United States Patent Application Publication US 2025/0051766 A1 - sequence listing, part 3

SEQ ID NO: 5065 - DNA, 58617616 bp, Homo sapiens (residues 2,171,024-4,342,046 of 58,617,616)
  source 1..58617616: mol_type = genomic DNA
tcgatatctgctgactgcattctccgcctcccaggctgaaaggattctcttccttcagcctcctgagtagctgggattacaggcatgagccaccacgcctggctaaattttgtattttttggtggggccttgctgtgttgccccaggctagtggtaactttgataagctttgggcctcagcctcaggctgtgtggtggggtctaaggtacagcaggggccccagaggagtcctccaggggaaggactgcgagaatgctgtggcactggcagagccttttacctggaggatccctgcattgagcccttctggtcccgaattgtactgagccctcttcttcctgcctgtaggctgaaagaatgaattcctggccctggaaggttcaaacagcagttctcaggggtggaggtggctctgcccccaggggacacctggtggcgtctagagacctttgcggttgtcaccaccggggtgggggaagcccaaggatgctgctcatcactcacagagcttggggcagccccaccaccgagggcgggccaggagacgccaagagctgtgcctttcatcgcctggggtcccgggcaccgaccgccgccgggtgtcgctccgtgttcgtgtacatgccttctcctgggggtagccctgcttttatttcctgagtgcttcctgggaccatgcatgtccggcaggccctggccaagatccaggcttgctgcgtgcagtccccgcccactgtgtccccctgagggaaggacctgaggtgaagttagcgtaatgggagtgtatttgggcctcgtttgcgggctgcagctctggagacacagattcaagtgcccagaatgtatgcgcggcagttacaagtggggcttcctggagaaaagaaggggcggcttttgcattggaatcacagaagtgattgcccggctccacgtccttcctggtatctcagactccagggacgtgaagataacagatggtcacattgtgcaaatagtgataaccttgtaggtaattcatcagctagtgtggaaaccccaggggaggaaagaaggccctgggagggagtgactgaaactcacttggaggctctctgggcctgtggagttctgcacagcatgcagctcccactcctcggacgcacttttcttttttgttttcttttctttccttttttttttttttgagacggagtctcgctctgtggcccaggctggagtgcagtggcgcgatctctgctcactgcaagctccgccttcagggttcaagtgattcccctgcctcagcctcccgagtagctgggactacaggcgcccgccgccacgcccagctaattttttgtatttttagcagagatggggtttcaccatgttagccaggatggtctcgatctcctgacctcatgatccacccgccttgggctcccaaagtgctgggatcacaggtgtgagccaccgtgcccggccagccacttttctttctttctttttttttttttgaagacagagtctcactctttttactcaggctggagtgcagtggcgccatctcggcttactgaaacctccgcctcctgggttcaagccattctcctgcctcagcctcccgagtagctgggattacagatgtgtgccaccaggcccagctagtttttgtatttttagtggagacggggtttcaccatgttaatcaggctggtctcaaactcctgacctcgtggtctgcctgccctgcctcccaaagtgctgggattacaggcgtgagccactgcgcctggcaatatttttcctcttttttttgaaataacatccttgttgtgacagttcacgtatcataaagttcacctgttttaggctggacgtgagaatggcatgaacccaggaggcggagcttgcagtgagctgagatcgtgccactgcactccagcctgggcaactgcgcgagactccatctcaaaaaaaaaaaaaaagttcacccgttttaagtgtacatttcagtgtgttttagtatattcacagattgtgcagtcgtcaccattgtctaattccagaacgttctaatcaccccaaaaggaaacgctgccgcctcagcagtcagtgctggtctcccctagcgtcctggagcgtttttccctgcatggaggcccacgagtcccgcgctttcctccttccctgtcacgctgtggctttaggaggcccacgagtcccgcgctttcctccttccctgtcacgctgtggctttggcctcaggctagagggtcggtgtctgtcagcctgtgctcagacgagggcgaggagagttctggtcagcgcgtccagcctccctcctgtgttgctttgctgctggaaaaagagggtcctgatgcagaccccaagagaggagagaactcgaggtgagccgcggatcacagtgagagcagccaccaagccgcttccttacacagcgggcctccctgacagagcagggcgtcctcggggagcaggcagagggtgcctgctcttccttagcgcctccgtctgtgagaaacggccagggttgcgagtaaacctggaacgtgcagacactcactggaggccagccgggtggtgccatccgaccacccttcaagcccagcctgctcaccggccctctcagtacagcgggcacgggttctgcgggctgcccggaagacctcccccagacccatagatgctctgtgtccttggtgggcagctcataagtgtgaaccttcccggtaccttgcgagtgcctcactacgcacttcaagacggggtcgctccggttgtgttttatgaaaccagaggcctggtgagctgagcttcctctcacagcttcacagcagcctgtgtgggtggcctcagccctcctgagcccctccagtgtcgagttgctttgactgtttccagggaactcctttggttgttgcgtagcttgggctgtttgtttgtttgtttgagacaaactctgtcacccgggctggagtattggagtttagtggcgtgatcataacagtgcaaccttgaactcctggctcaagcgatccttccacctcagcctcctaaagtgctagcactacaggcgtgcacagctgtgcccagccagctggggctgttgcacatgggctagttattatcaagtcagctgaagccttgtcagccatccttggtctgagctctccctggctctcgggcagcaccgtcttcctcctgtggaggtctgagtccccttttcacactgcccttgatcctacagacagatgctcagccaggaagcaacatgctctgatgtccaggcccagctctgctgtgaagtagctgcatggacttgggccagggcctgtgtggaccttgggttgagggtcaagtctaaaaatgctctgtcaggttgggcacagtggctcacatctgtaatcccaggacttggggaggccgaggcgggcagatcacctgaggttgggagtttgaaaccagcctgaccaacgtggagaaaccccgtctctgttaaaaatacaaaattagctgggtgtggtggcgcacgcctgtaatcccagctacttgggaggctgaggcaggagaatcgcaaaagctaagataaattttgtttttttctttttttagagatggggtcttgctgttcacccaggctggagtgcagtggtgtgatcacagctcactgcagccttgaactcctgggctcaagtgatcctcccacttcagtctcccaaacagctgagactacaggtgtacctgtcatgcccagctagttaaaaaaaaaaaaaagcaaaaactttttttgaagagatgagggtctcaatatgttgtccaggctgatctcaaactcctagcttcaagcagtcctcccgcctcaacctcccagagtgctgggattacaggcataagccattatgtctgatctctttttaagtttttaaatatatgtgtgtgtgtgtgtgtgtgtgtgtgtgtgtgtgtgtatatatatatttttttttttttagatggagtcttgctctgttgcccaggctggagtgcagtggcgccatctcggctcactgcaagccccgcctcccgggttcatgccattctcctgcctcatcctcccaagtagctgggactacaggcgcccaccaccacgcccggttaattttttatatttttagtagagacagggtttcactgtgttagccaggatggtctcgatctcttgacctcatgatcctgcccgccttggcctcccaaagtgcttggggattacaggcgtgagccatggcgcctggccgatattttgtatctttttaagagttgaggtcttgctatgttgcccaggttagagtgcagtgacgatcatgattcactgtggcctcaaactcctgggctccagtgatcctcctgcctcagcctcctaagttgctgggaccccaggcatgggccactgcatctggccaaggagataaattttcataacttatttaaccaagtataactggaatattatcattttatcatgtaattaaaaaattgttctggctggacgcagtggctcacgcctataatcccagcactttgggaggctgaggtgggtggatcatctgaggtcaggagttcaagaccagcctggccaacgtgatgaaaccccatctctactaaaaatacaaaaaattagccaggcgtggtggctgacgcctataatcccagctactcaggaggctgagacgggaaaatcgcttgaacccaggaagtggaggttgcagtgagccgagactgcgccattgaacctgggaggtagaggttgcagtgagccgagaccacaccactgcactccagcctcggcaacgagcaaaactccgtctcaaaaaaagaaaggaactcccacacgagctggaagccagcactgggctcttccgcacagaggctcccacccatagaccaggagtacgaacccaaccgtgctgctctagacatgggccctgggatgatcacccaacctctgtgtcccggctctgcctgtcccctgggctctccaggaacaggtctgtgctggaaacgcctcttggccgaggctgcttttactagacatccactctcagttgggggtcctccaggccctgcacacccacccaccatgagagggaatgtcaccgcttggcctttgggattcagaaaaacctggtgaagtctgcacaaagccctgtcccccagccctcggtccacacagcatcccacaccacaaggcacctctggacaggaggcagtgcgagcaagaggggacaggggcagtaactcggggtgcactgcctggtggggacactgtctccctagctgtgaatgacagggaatgaggcacaaggacgaaacaggcgtggggcagagggcacggctcgcgggagttgcagagcgagttcaccctgctactgcttctgcggggcactcatttttagaagtacacttacgtggcccccaaaataatgtcacgctgccaaggagagcaggcaagggcaggtgacaccgctgtcaatcagagcatttccagccctcacacctgtgagtcatctggctcccaggaacattctctgttccagtaaggcctgcgcctgtgagaagcgcttggctgaatcctaggaagggggacttgggccgacagccccctccaacctgcgcagcctcaggacactcaaaccacagctgcaaacactgccagccagacatgcagctcccgcggccaccactttgagacagcgactccctgtgacaagaaaactctgaaaccaggcgaggcagggccctctgtcagatgatcactggggaagacgctatggacagacaggaacttctgggaccacagcaggctggaattccagcttgaggagggagaggggaaccctgccgtgggccctgacagtgagcaggaggaaaggggtctcacagaagcaggaccccgatatgagggagcaggcccagcaccccttcctcccgcccccagcccctatccagagagcaggctggccctctgggtctcgcttcagatgcgtagaacccagtgcttccggctgcaccctgcaacatcccgcagcagtctgtgggggtccgcaggaagaagactcccccgtgagggggagctctgtggagcggcactgtcctgacggcagccactagccactcggctgtgggcacccgacatgtggctggcgggaaggagctgtgcagagcacagaacatacaggaaacgaccaggtgtgctgcactcgccccacacacgcagtcaaatcacgcaggaacaattttttttttttgggagaaaaagttttgctcttgtcgcccaggctggagtgcaatgccgcgatctcggctcactgtaacctctgcctcccgggttcaagcaagtctcctctctcagcctccctagtagctggaattacaggcacccgccaccacacccagctaatttttgtattattagtactactaacaatttttatattattagtggtaataatttttgtattactagtgatagagctaatatttgtgttattagtattcgccacgttggccaggctggcctcgaattcctgacctcatgatctgcgcccagctcgtgttgaagttctttagccacctttgagcaagggaccctattttcactttgtccggggcctgcaagttctgcctgctccctcgccaaccctcgccagccctgctctccgctctgcccagccccggctcttgcctcctcctatttctttttcctttttttttttgagctggaatctcactctgctgcccagattggagtgcagtggtgcgaccttggctcactgcaagctctgcttcctgggttcaagagattctcctgcctcagccactgagtatcttggattacaggtgtgtgccaccacacctagcaattttttttttttttgagatggattctcactctgtatcccaggctggagtgcagtggtgcagtctcagctcactgcaacctctgcctcctgagttcaagtgaatctcctggctcagcctcctgagtagctgggattacaggcacgcaccaccatgcccagctaattttttttttttttgtatttttcatagagatggggtttcactgtgttagccaggctggtcttgaactcctgacctcgagtgatccacccgcctcggcctcccaaagtgctgggattacaggtgtgaaccaccatgcctggccattttttttttttttttggtatttttttgtagagatggcgtttcaccatgtctttgggaggccaaggcagacagctcacttgaggccaggagtttgagaccagcctggccaacatggtgaaaccttgtctctaccagaaaaaaaaaaaaaacaaaaaatctccaaaacacacttcactttgaaattttttttttttttttttttgagacggagtcttgctcttttgcccaggctggagtgcagtggcgcgatcttggctcactgcaagctccgcttcccgggttcacgccattctcctgcctctgcctcccgagtagctggactacaggcacccgtcactacgcctggctaactttttgtattttttagtagagatggggtttcattgtgttagccaggatggtcttgatctcctgaccttgtgatccacccgcctcagctggcctcccagagtgctgggattacaggtgtgagctaccgcgcccggccacgcccagctaattttttctatttttagtagagacggggtttcaccttgttagccaggatggtctctatctcctgacctcgtgatccacctgcctcagcttcccaaagcgctgggattccaggtgtgagccaccacgccaacccctaaagtggttttagacttagaagaaagttgcaaagcaccgcacagactttctatgtggctttatttcatcacagtaccctgatccgaaccaggaggtggacggagctgtggcctcagtggcatatacgtcccatcccatcattgccatgagcccttgtgtctcctgtctcccctatctaggctgatccctcagtgcataaggaaagctgggggggggtctcctatggtctggcctttggaggagagccagctggggtctctgtgtggcacccctcagtcaggcttggctgcttctctcagggttatactgaggttctgcatcctggcaggagccccacagatggggttgcgtcccgctgggccttgggaggctcgtggcggctgcgtgtctcactgtgatgacgctggccttgtgtttcgtcaggtggtgtccacaggtgccctgctggttgctttttctctgccctgggagaggctcgctgaggctgcacggctgcctgggagaggctcgctgaggctgcacggctgcctgggcggcctctgacgcgccctgtggactgcagcatccaggggatcgcgtctgcaactcttattgctttggcgtttacctattggggatttaaaaaaaaattgttcatttttataaaaaagacatgggctggctgggcacggtggctcaggcctgtaatcccaatactttgggaggctgaggtgggcggatcacctgaggtaaggatttcgagaccagcctgatcaacatggagaaaccctgtctctaccaaaaatacaaagttagccaggcgtggtggctcatgccagtaatcccagctactcgggaggctgaggcaggagaatcccttgaacctgggaggtggaggttgcagtgagccgagattgcaccacttcactccagcctgggcgacaaacaaacaaacaaacagaaaaaagacatgggctctcgctgtttcccaggctggcctcgaactcctggctcaagtgattcgctccctgcacccagcctgttgtgggtttatatcagcacagtagcacgcagacgcgacgaaagtgcacgtgtcctggtggcgtgcacttggtctctgattctcggtgatgggtgtggagtcggagaggcttgggtggccctgctgggtgtgaacctgcctttgacattggccttgtagagggagcgaagggcagggtgctggacggggagggatctgtgttaggccaaggaccttggttttagttgtggcaggttctgggctatggcgaggccgcccacgtgggctagcccagtggtttttttcccatggtacagttggggaaacaggccccgtggaggctctatcacctgcggtcacataccaggcctttgccaacgcaggactcccagccaggctggagctccctggctggagcagcgtcgggagaattcccggtgggcctgcggagcgcggtctgagggacttgggctgtgttgagggatcaactgacctccagggaaaaaatggggagacatgtggagcggagcttggggcggccgtttgctttagggtgggagaggagcaggaccgggggccatagactccatcccaggccgctgcctgctcgctgcctgtagtaggacacagcgtgccagaataggtccccggcaaggtctgtgttcccttcgtggtccagggtctgggagtgtctctggtggtacccgctgggtggtgggcttgggagctgcaccagttgggaaatgaagagatgggaagttgacggcatcgcttgtccgggaagagagcgatgggctcacggggtggaggatggctctgcgtctcaaacttctctctctgtttcaggataaacatcacgatgctgctcatgaaatcatcgagaccatccggtgagtgcacggcctgcagtgtgttgtcttcacagccctgagccacttccgtggacacccgtgccctgcagattctgttgtggggatggctcctgcaggggtggactcctggaggtgttgtgaagcggatcaggggtgactcagggacgggtagagctgcttctcccagctccattcctggccagtgggtgcagaagtcttgagctgctggggtgtccagtgggtcctccaggggcgttgccctgccttcctctgtctccttgtcagtctccctgctgtgggttttgggccgaccttcaccctcacgcgccctcgacggcctcctgtgtctgtgccccatgggtgcagagaggagcattctgggggtgacttggatgggcaggaggcggaggccgtcctgtcctcgtaagctccagcctgggctccaggatctgcagcaacagtgcagggaggccctctgggtgcctctctgctgcccactgggaagctgcccatggtggccggcattctgcgtgtctcaggtgctcagggtcagaaccctcattgtgtggcacctgcacggaggccacatgtgtccatgtggccctggcgtcttgctggtctgttccttagcatactgggctgtgaggacaccgcccgtgcccatgcccagcatctgcccaggcctgcagctgccataagggccatgctgagctcctcttggccgggtggctctgtgccaggcccctagctcctgaggccctgtagttcagtgttggggcccagcggcacctccctggccaggttgtttgaggattaagtgaaatcgtttgtgtaggtcggccagggtgggcctgacccagggtccgtgcttagaatgtgggatctgcttttttttaatgtcatgatccgtggaccaggcagtggagtaggggcccctctgttctttgtaaaagaagtctggtgttatggttggagggagggctctggatcaggcagctggaccccagcccagcccccgcccagcaccagccccagccccagccccagccccagccccagcccagctgcagcatgcttctggcggccagccgcctctctctgcctgggtttctcttgttgcagctgggggccaagactctgctggcgtgggcctctgtgggtgctcctcacagagggccgggcagtctttttaagaatgctcaagctgtgcacggtggctcacgcctataatcccagcgctttggaaggccaaggcagggagatcgcttgaggccaggagttcgagactggcctgggcaccttggggaaaccctgtctctactaaaaaaaaacacaaaaattagccgggtgaggtagcaggtgcctatagtcccagctactttggaggctgaggcaggagaatagcttgaacccagggggcggaggttgcagtgacccaagatggtgccactgcactgcagcctgggtgataagagtgagactccatctcaaaaataaataaataaataaataaataatgctcagctgggcatggtggctcacacctggaatcccagtgctttgagaggctgggagggttgatcacttgaatccaggagctggagattggccgggcaacataatgagaccccaagtctacaaaaaagtaaaaaattagctgggcatggtggtgcacacctgtggtcccagctacttgcggggctgaggtgggaggatcacttgagaccagtggcgctgtgattgtgccaccgccctccagccaggcaacagagtgagaccctgtctcaagaaacaaaacccaaacaagaaagagtgctccagggctgtggcttcccggggctgtgactgtgcaggttctgccagtgctgcccagacgtggtctctctgggttaggatctcggtgcagcaggggtggaagcccctctctgaccaggcgcttgctagtgtgtctggaggtgctcagcagcaggggagctgcacctgctccccatgggaaggggcctgcacagacttctggggtcagaggagaccccaggcccccggatctcaggcagtggcggtgagagtgcctctctggctgcatgctcgccttctgcagggctcggagctgactgtcttgtttgaaccttgtgtgttttctggggagcgcatctggagtctggagcttaagcgttgtagggagcagggtccaggcacaggggcgtgcaccaacacctgggcatccgcgacgtaggcagagacctcgaaactcgaacccccaccacctggagaggctgctttctcccgtgcatccccagcatgtggccagggttctcacggtgtggctgcacagaccttttctgtctcacttcctctagaaacaccgacgacgttcttacacagcaaacaccattcagtccccatacggccagtgtcccaagcacgtcctcccacagtggtgttgtttttttgagtcagcgtctggctctgctgctcaggctggggtgcagtggtgccatctcagctcactgcaacttccacctcccaggttcaagcaattctcctgcctcagcctcccgagtagcagggattacaggtgcctgcaaccacgcccagctaatttttgtatttttagtagaggcgaggttttgccaccttggccaggctggtctcaaactcctggcctcaagtgatccacccgcctcggcctcccgaagtgtggggagggctgttgtttaaagatgattgggctgtcctaggctctcctcgtttggatgtccgttgagaatcagcctttccatttctccagaaaagctagctgggctttttctagaaattggtttgagcctgcagttcagcttggggaaaggggcgtttaaacagtgtcactcccaggtattcctgcttcagtgcttttttttttttttaaggcggagtctcactctgttgcccgggctggagtgtggtggcgcatcctcggctccctgcagcctccgtctccggggttcaagtgattcttcttcctcagcctcccgagtagctgggattagaggcgcccgtcaccatgcccagcaaatttttgtgtttttagtagagacagggtttcaccatgttgatcaggctggtctcgaactcctgacctcgtgatccgcctgcctcggcctcccaaagcactgggattataggcatgagccaccacgcccggcctttggtgcttttttatgtggcattttgacaatcctttgctgctagtatgtgtaaagactgctcccttttgcctatcggccatgcccctgctgagctctggcggtgtccgcgcgtattcctcagcacgctctgtggcgcagaaccacgggactgagtgaagaccgtgcggccgctcctttcaggctccttgctgctttgagtgtttttcttgccgagttgcgctggccggaacctcctggacagtgtgatgagaagtgactgcagatggccttgcttgggttgctctcggggcctcgctcggtgcctggggcttttgatgatctgcattgtgaggtcccctgccggtgttggccaggtgtgcaggcgttgaccatgctggggacgggtgacgagaggcaccaataatcacagagggcggatgccacagcccttctgacaggatgctgtgtctttcagtgtggaagggtcttggagggcacccggacctgaggtcaggtcctggccagctggttggggagtctggggacttggcgtggggtagggggcaatgaagctactctcggagttctgggaagctgcccgctggacttagcaggtcaagaggactggggagcagaggccgaacccccatccctccctgacccctcctgcagagccgcaggccaggtggctgcggaaggtgggcctgctgctgtcacagcggctcagtgactggtcccgtgccctttccaagcggaaggcgtgtccttccatttctggcctcttggagggtaccgtcctgatggcaccgaatgccgtcctgtgggctttccgtactcgcccacacggggctgctcagatctccgtccttgttccttcggtgaattgcagtgactaattttagagtgaagcagcttttcctccccaggaggtgctgtgtgtggttgtgaggtgccgctgcggtttcctcacgtttttaagggatagtggggtgtgttggtcagggatgttggtcagctgttgcctttcttgtcctttctttccagccctttgcgtctctatggttttggtgtcaagatgacgctggctgcataaaactctgagaaagtttctgtaggtttagtgtttgtcttgtcagtgtttgatggaattcaccagtgtgtttttgtattttgtatttttagtagagacggggtttctccatgttggtcaggctggtctccaactcctgacctcgtgatctgcccacctcggcctcccagagtgctgggattacaggtgtgagccaccgcacccggcaccagttggctttagtttctagtcagtcagttgcttttcgagctctgatgtggccagtgggtccctagaccagccctgtagcagataagttcacttaggtccccagagccactggtgtgtggcctcgaagccacgtaatacctgtgtgattcagtaacagcttcgtggtaaacatcgtagccttcgttttgaagtcacgcctcccttctctctccactttgagtggaggggtaaggatgtttgttttctgttggagaggatgcagtgtttaagaacatgcggggtaatactcaagattgtttacacctgtcatcccagcactgtgggaggctgaagtgggcggatcacttcaggtcaggagtttgagaccagccttgccaaaatggcctaacccggtctctactaaaaatacaaaaattagccaggcgtggtggtgggcacctgtagtcccagctacttgggaggctgaggcaggagaatcgcttgaacccaggaggcggagcttgcagtgagccaagatcacgacactgcactccagcctgggcaacagagtgagactccgtctcaaaacaaaaacaaaaacaaaaacaaaacacaaaacaaaacaaaaaaaaccaaacccttcctgatcgtttctgctgctgtgtttcagatgggtctgtgaagaaatcccggatctcaagctcgctatggagaattacgttttaattgactatgacaccaaaaggtaagcagagtcctgtccagccgctccgctccgaggacagactcggctcttggggaggacaggaggacgcatcctataattagctcttcttagatggtgcaagctgatctgaaatttccttttagagttggccgtggccaccataaagttattttggtaggaaatgtttatcaactcttggcaaaggctgtcagaggccggacagaattggaaactccggttgtggaaagtgggattggcatgtgtggagtcagcccgcgctagtgatcgctctttttatagcgggcggctgacggccagaagtccgcgttcctgcctgaggctgctgggagggcctgggcggccttaggctgcttggcagctctgtttagatctcagctgggtttggttagtccctctgtctccagccctgtggctgcgttagcaatttcgccctggcagctcctgggtctcggaggagggtcttgtgggtggagaggggcagggctgtctctggaatgcttgcttggaagtgttttgtttttctttgacaaggaagacattccaggctcatgcctttttcagctcttgagtctgaaatcaacagagtagtcctccatcaagggctgtgctgtcgtgagcttaggtgagcccctctccacagagagtcaagcccagagggccacgcggctgcactttacctggctctccggcctcactggcatgtgggagggactcttgtctggggtcagcggtctcagcctcagtaaacctcgagatcctgtgcccctccctcgagccctgcccattccctggtcagcaccctggtgccccacaggcagacaagcgtgttgctggcagggtcctgcgtgccgacctgctgctgtggatttcacgccacctgcctcgcatgtcggggcctctcgccaccccccctcattgggcgtgatggtgtgctgggcccttccctggtttagtatgaagagtgtgatgcagcgtgcagatcaacagccgcatggcagggtccacagggaggggcctgcagggccctgcacagagctctgtgtccgtggagttggggagcactaaccccaaagctctgcaccctgtgctttcgggttttcacggaggcttctcggagacttgcttgatgattgcctccatctccagtcccctctttctaagcttcttaccgcagcttgggctttacctcacccaggagccccccacaagtcgcttccttacaacagaagacactcctgtcacctagaagttcccagggatcaggagctttgttaggaactagagtcccctcggatgagtgggtgttgtcgggctgagccctttcacattaacctggggcagttatggcacctcacttgtgtgtggccagcttctgccttggctctgagcagcgagcgtgtcagacgctgtgctcacggcgcccctccacgtgggtgtgtggcgtccttcctcttcgcgtgggatgggcttagccaaggctggaaggacatcagggacaggctgggcagggggtcttcgttggagctggcagggccacctgagggaccgagccattagggcttcagaccaaggacagccccagctcctctgagcacctgcatttgcacagcctgccagggaagagtctcttcccaggagcgtgcagaggtgattttgggaaggtctggttgtcagggttgaaggcggcgtgtagaagtggaaacacaggggctgggcaccgtggctcacacctgtaatcccagcactttgggaggccgaggcggatggatcacgaggtcaggagatcgagaccatcctcgctagcacagtgaaaccccgtctctactaaaaatacaaaaaattagccgggcgtggtggcgggtgcctgtagtcccagttagtcaggaggctgaggcaggagaatggtgtgaacccgggaggcggagcttgcagtgagctgagatcgcgccaccgcactccagcctgggtgacagagcgagactccatctcagaaaaaaaaaaaaaaagggaagtgaaaagacaggaagggccagggctgctcctctggagctgcggggaaggcgggaggcagcaggccggctctgtgggttcctccggcccgcatggtgcctgctggccctctgcaccacctgggctccttccacccccgtgtccttcgtcctccggaggatccaggtcctgtgtggccgtgctcccggggctgtcggcaggctcttgttcttggtgtttgctcctcttaagttctcttgctttatcctatgcagctgctggttaaggaaaacatgaacttggcctgtggagcactggttttcctatgaggaaggggaagtgtgaacctcggcacatgcagtgcccaggtgaattcagggtggccagggcagggcaggaagagcatggggctggggctggggtgggagcaggggtgtgattgtttagccacgtctcggagcatctgccaggctcttggggttgccattgggaggaaactgcttgcgtgcacgtggaggtggcggaggacggaggcggaggaaagagtccccagccgccgccccccccccccccacccgcacaggtgcaggccccctcggcgctggggatgtggaagtcggattgttctctgggaggggccgtcctgggcactgcagggtgccgagcagggtccctgcctccatctcttgcttgcctcgccacattcctggggtccccggtgagagccactgtgtgtgacagtgttcactggacaggtacgcctcctcctcctgtctcttgctctgctctggacaccttctgaggtggagggacagacgctgttgtccacattttgccagtgggtccaacagacttggaagatgagcaagttatcccaggtggagactggacagactaggccaggcagaccccgtagcaggcttgcccccaccccggaagcccctctgagcccaggcctggctgggccgcgtggccggtgtttcttgtggctcacgtgccccacagacagtgggcactccctggagcacaggtgccccctgccctctggtgggctctgccccgatgctgttgggttgtgggcacttaggtaatgagggtttgccttgcggccagggcaaggagggcagagttgctgcggggggactgagtctcactgtggaccctgctgtgccgtgtctgacatgacacactgctgacgtgacacactgctgacgtgacacactgctgacatgacacactgctgacgtgtgaatgagttggagctttggaaggacacgctcacagagcagtgtgggtgggggtgaggcatcttcctttctgcagtgctcactcctcctgcacctgcccgggcagaggcctggtggtccctgggagaccccagccgttcacctgcctctggcgatggtggctgtccccagccagggcaaggaagaccctctaaggccggccccagggtttcccacttggggggctggcctcagtccccctcgagccctctttctctcctcacgcctccagcacacgtggacctcggctttgcgcgggagcctgggcaggtccagactgcctcagggctcagtgcttccctgcaccggactctcggccggccacctcgcttgtgtgtcaaacctgaaatctcctgcatcagggcggaaagcgaggcttctgccagaagggtcttggccagctggctggtggctgtccaggcagggaccacaccttggagcctgccttatccacatgctgtcccctcccatgcatgcggctggctcctgcccgcatgaccagggccttcccttgcctttttcagcttcgagagcatgcagaggctctgcgacaagtacaaccgtgccatcgacagcatccaccagctggtaggtggcttgcccctgcccagagggggttagtagtgccaggctcccggacccctccagaccccttatgtcaccgcctcggggcacagagctccccttagagcccctggggattggaatgtgcagcgtggggggacgatgggctgtgggtgagtggtgtgggggctgccgaggctgggctgtgtgctgtggccgtgtgccaaagcagagccgtccgtggtttgtgtgctgaggcagggccctgagggttgtggtgtctgcacacgcctctgcagccctgggttggtgtccgcaggtcccagcagaggcggggtccctgtcctccccgggctgtgtgaatgccggccttcccccttggacctcccccacaccgcctgccttcatcaggctggatgccggcctgggctgcacccttgggcaccccggtcctgctgtgtctcgtgaggctttcctcacagaggacggggcacacagtgagctggggtgtagcagggaggggaacgtgctgcttcccatgttctagaaagcaccgggggcccctggtgcatgggggtaggggagctctttcttgaaggtcttgctgtggagggagccctggtgggggtggcatgggctcacttggccctcctgagtgggactgggctgggctgggctgccccatcagcctgccacccggctctggcttcccctcaacctcatgcatgcagctctgtgggcccctgagagctgagctggcctgggcgagaggggaccacctcagcctgctgcagctggtggggaggaaggcggggtcccacgtagtcgagtcagatgaggtgtggtaggctcagggctttcacggggctcgtggcacctgacgggggtcccttggtgtcagcgccccaccctgctgccttggcccagaggaggggtggtggtcttggtggcctgtgtggttttggtggtcttgccagtggggagagaggcccgtggcaggaggtggagcctcctaggacccctctgagttggggcctgtccctggggatgctgctttactgcttgtaggaaatggggctgggttggaaactgacctgggagcccggcagccaccctgcagggggacgagaggccatgcagccgactccctgcttccgctgggaaaggtcccgggtcttggtggtggaggggctgggccgtgaggtttatgtgacatggccgggccaccctccgtccgcagtggaagggcaccacgcagcccatgaagctgaacacgcggccgtccactggactcctgcgccatatcctgcagcaggtctacaaccactcggtgaccgaccccgagaagctcaacaactacgagcccttctcccccgaggtgtacggggagacctccttcgacctggtggcccagatgattgatgagatcaagatgaccgacgacgacctgtttgtggacttggggagcggtgagtgtcgcccgccatgcccggctcctgtgcacttccaggccacacgctctgtgcctgccccatgcctgcttggagaagagtttatcagggacttgcgacgttggcgtggacagtgcttccttctcccagcgcctctgtcccgctgtggggccgttcctttccccagccctgaccgggctccacccagaggggagaaatcgcaggaacccagtggctcccagaccaggcccatcctcccaggtgcccggagactctgctttcgtcctgcttcccaccagctggggagctagacctgtgcaccctctactgctcgctcccagaagctgccactcgctagcctgggccccagcccgggccccacccacggctgcagcctgccgcagtccttccctgggcacacctgctccctccacagcggctggaaaggtcccccgcggaggaagaccccaggtccctgggctcccggaggccctcgcgccctccctgcatccccagtctccctcggcacccctgcgtctgggccgtgccctgcccctcccaggttggggctcccacctgctggcattctttcagcctctgcctgcactcagactctgcttgtgaggtgtcgtctcctctcaaccacgggcggggctccttgaaacgaggccctaggtgtgtcttcagcagcagcgtggcctggctgaagcacagatgagcggcccgtacacgaacagcctcagtagcctgacgaattcttgataggaccaccccatccaggctgcagggctgacggggccacccaagggtcagacagtgaaggccccttctccacagtgtctaggctgtccctgggctccttggacctcgatggacatgtgaaccttgtgcctgcaggcacgcgagccccacgtctgccccctttccacagtcctggctttgacgtggggaaggggccccaggggcagggaccaagaggactttgcacagactgggtgtggcagctcacgcctgtcatcttagcacttggaaggctgagatgggagggtcacttgaggctaggagttcaagaccaggctggtcagcatagcaagatcccacttctgtttatttatttaaatttattttcaaatttaaaaaatgcaataaaaagaatgtgtatcgtctggacgtggtggctcacgcctgtaatcccagcactttgggaggccaaagcaggcggatctgagctcctgaggtcaggagttcgagaccagcctggccaacatggtgaaactttccctctactaaaagtacaaaaatcagttgggtgtggtggcgcgcgcctgtaatcccagctacttgggaggctgaggcaggggaattgcttgaactttgaaggcggaggttgtggtgagacgagatcgcatcacggcactccggcctgggtgacagagtgagactccgtctcaaaaaaaaaaaaaaaaaaaatggggcatatctggctgggctctttggctcctgcctgtaatcccaatgctttggaaggctgaggtgggaggatcgcttgagcccaagaggttgaggctgcagtgagccaggatcacaccactgcagtccagcctgggtgacagaatcagaccctgtctcaaaaacaaaaaattaaaaaggcttatatgttttagatgatgacggcctagcacttgctggccgggccctggccccccgtccctgtgtgcttctcttcccactggtgtggtggcggcggtctgtgcccattgtggtcgctccatggttcatgcccgttccctggagcacagagctgcctagcaggggaggagaggtggcttgacacccccggtgtgcgccgctgcctccaccctcctgacgctggcgtatctgcagcccctgttccctccttctcccttagagccgggtgttgctgggttgtgtgctgatgctgtgaaaccgcagcggccgggagactgtcctggctgcgggggacccctcactgcctctcccaccctacattgagcctcagtcagatcctgctcatgagccttcctggggtgccataagattttatcagccaggttgctgtgtgtctgtgtgctggtgacgtggggataatttgaggtggacggcagcctttccagacctgcaaagtcttgggcagccctgtctgtctgaacagtgaacatcacatagggccctgagactcaaaatggattctggtttcgggggccaccaagtgatgtccatggatgacgcgttgtgatgaccgtcccctcgtgggggctctgtcaggggcctggtctctgggaaggatcctgagtgaccttggagcatcggatatgtgtggagactgtggcctcccctgtgggtcttcatggccgcattcttgtggcctctgtctccgagcctagcacggcctcccgggtggcatctgagcgctgtgtggtatctgatggatctctctgatcataggtgtgggccaggtcgtgctccaggttgctgctgccaccaactgcaaacatcactatggcgtcgagaaagcagacatcccggccaagtatgcggaggtgagcggatctgagggccagggtgtgttggaggcaggggaccatcagagaaagtgacgccctgggtgcctgcaccccactgctgtgggacttccgagtctgggtggcgttctttccaggcccaagacgtcttggttgcctgcagcgtgtgcctgtgaatagggtgcccgatcgccctcacggcccattacaggccggccctccaggcctgtccaagcgctgcaggggtgtctcggagcctgtttcatggcacgtgccactagtgaggcgagaggtgctcagctctacctcgtggcacagccctccgagaagcggggtgttttgggtggcctgcccaggcaggcgcattgaggccctgttgctctgagagtttgttgttgtttttttttgttttgttttgtttttgagacagagtctcgctcagtcgcccaggctggagtgcagtgactcgatctcggctcactgcaagctccgccacctgggttcacaccattctcctgcctcagcctcccgagtagctgggactacaggcgccccccaacacacccagctaatttttttgtatttttagtagagacggggtttcaccgtgttagccaggatggtcgcaatctcctgacctcatgatccgccctcctcagcctcccaaagtgccgggattacaggcgtgagccaccgcgcctggcttgccctgagagtttgtaacgggcgtttggtttctttccttccagaccatggaccgcgagttcaggaagtggatgaaatggtatggaaaaaagcatgcagaatacacagtgagtgccatcgctccgccccggctcccatcgccggccccacccccgctcccaccctcctgtcagcccctcctttcttgccgatgttggcacatggctgttggcacatggtgtgccccctggagtcccctctggttctcgtagggctgcctgggcgtggcgtctgagccggcagcaggcgcctctgttggtaccgtccctctcgtcctctctgacatggcttctgtccctcggcagcatgcggtgcacagaggtggtgcagggaatgggcttggggctccatggagcggaggcctgtgggacaggctgggttctgggctggctgcggcatccttggggtgtcatccctcactggggacagccttgtttggacgggttcctggtcctcagtgctgtgttcttcatgacaagccagcaacctcggggtgggcagtgttctctcccgccctgttgtgatgcagtctcaggtgctcctcccatggaccctggggatggcgtcgcgtgtggccctccctgtagggtgtgcgctcccctttcagtggctgagtggcagtgggatgggtgtgggggtgggaaggggatgctgtttagggagcaggaaggacagttttcctgacccaggttgggtgattaatgggccatagcttccaggagtagccaccactcctgcatcctcctgggaactccttcccaccccacgctgagtccttagacaccaggctccgccctggtcctttccacacagaggcctgcagagctgggtccttccttgacctgtgtgctcctcctcacagtcccagctgctcaggcgctcacctgtggtggaggctgatggcgccccgggcccatctgctctgtctcccagcgacgtcccagacctccccgcccttatggggtgtgggcttggtgctggtgcagctgctcccgtgatgtggattggagggtggcttggggtctggggactgcaggaaggtggatgcttcctattctagacctggagcccctggagtacagagcccgcagcccctcgagcctcagagcccgcagccccttgagtcctgagaagcttcccttataaggcagaaggagtgctgggtggggcgggcaccaggtcaccaccctgggaggacgatggcacaggggttgccaagctgcccagcagagcggctcaggatggaacatggcaaggccaactcgtgatcccaggtgcctgcgacgacccagttcctgggtggaatccgcaagtttgcagaagcaacagaaacaaagtgttcaggggtcctgttgtcattcgactctcacagttcagagggatgcatgagggacacaggtggcatacagttccagtcccctcccaggtggtgcccacccctcactgtctcctcagcagggtgcgtggaggcgtggctggggctgtgtgcccgcccgtctgcctggagctccctgctgaggtgccctctgtgggcctgtcagccagggccttcctcggatcgccgtgaggcctcgacattcctgtcattgccacgagtgggcgtgcgtcctgcctagcacgcgcccctgtccccagctcagacccctccgcactgtcccacagcacaagtgaaggccggtgtcagggtgcagggccccgatccctggtggccccgaccggggtcaggagcccttgccaactggctctgccttgggcgtcctggctgtggtggtctggcagatgaaccttttggaggatcacttgagcccaggagttcggacacattttttttgtgcatgtgtgaaagaaagtcttgttctgtcgcccaggctggagggcagtggcgcaatcttggctcactgtagcctccgccccctgggttcaagtgattctcctgcctttgcctcctgagtagctggaattaaaggcgcatgccaccacgcccggctaatttttgtatttttagtagggatggagtttcaccatgttggtcaggcgggtctcaaattcctgacctcgtgatccgcctgcctctgcctcccaaagtgctgggatgacaggtgtgagccaccgcgccgggcctccttggggtttcctacgttgacagttgtgtcgcctgcaaacacggagctttgccttttccttagcagtccgtgtgcctttcctctccctttcccgtaccctcgtgctggccggcgctggcatttcccatgccatgtgagtcgtgagggcaagacgggtacccttccctgccctggtcttggcggtcagctgagcccctggccgcggagcacggtgttagcggcgggctcgtgtggatgctctccctcgggtggaggataagcccgtggtcctgagtgtgcagcgtgcgctttttcgttgctgcttctagtgtcagcgcggtgctgtggtttctgttcctcaccccgttgctgtgatgggtttccagtgctgaacgcgtccgccttggtcggcgtgcgattctgtttatccaaggtgggattctgctggctgatgggccgctgaggggttttctgccgtggtgggagccgtggcctgcggtgcttccttgcggccacgcctgtctggtttggtctctgggtggcgctccctcggcttctgttctgctgtctttgaccaggacttgcgcatccagggctgtgggcccggctctccttccctttctcatggtgattgttcccaaatgctgtgcccacagtggaagctgtgtggtgtcctgggttctgggtccacttgcactctggccggaagttcccacatgggttcctggctgtggcaggcgagccacacagatcccagcacagaggatggaagccctcgccatggttcccagcgatggccaggagggcgccatggtgccttcctccgcgcggtctggctgggctgagccttgctcaggagaggggtgctgtcgggtggtggggctgccgcagcactgctcccccttctgcctcatcttgtcagcgtctgggtcagcaccctgcctcctggggcctgggtccatgacacggctgagcagcatggtgtctagtgtggcacaggtgctcctggcatggagctgcgttcgtggtctggattccgtgcaggtttaggtgctcacggtcaggccagtggctcctgagatgtgtctgggagcatgatttgggggaaagcgtggcattcttcgtggctttggcaacacgtgtcagaaagaacctggtggtggggaaagcaggtgtcagtaccagcctctgcctctggcatccgtcctgtttacagccaaccctgctgcggagggtgggtcagagaggcttccacctgactgttccctgccctttctgatggaaacttgcatctgatattggaggaaaccctcggagcaactctctgtggctttgcctgtgctccacttgggaggctccaagtcctcccgcctgagcagtgtcaccagggaggctcctagagacccagacccccgcttcctatggggccggcatttcagactccagagggaagcagggttgcatataaaccacggtgtttgcaggaacagcttcggccccagagcccatcctgtcatggagcgtgggggaccccagggagggttcccagccccaggcctgtgatgcgagcccggatctgcttagtgctgctcaggacttgggatttgagtcatttcctgggtggcttgttcacggggaatgagggatgttcagagggtctgtcaggtgtggagagggaggagacgggtgtggggggtggcccagcacctgcagaggctcaggatggctcgcctgcgcacctcccatcccgtctcctcccctcctgggggcttcccgcggccttggagagcggaggatgtgcagctgctcctggccggggcgggtggccctgccctctggatctgcgtctgggtggacgagtggccctgtcctccgggcccgggggggtgtccctgtctctctggggctgagtgggtgggccaccctgttgcttggggcggcggcttgcttgcgttaccctctctgctcggggactccgtccccatcctgagagacgctgggtggggcgcgaggcctgtggctgttgtgtggaaaggagtgtcgctggtcctccctcggctcttggggtgctggtgtgggcttctgctgtggcccaggtgccctcacccccaactactccagcccccagcatgaatccccttcctgtctctggatgggcctgtcccggacatttcacagaaacaggatcacacactgcgtggccctctgtgtccggcgtctctcactgagcgtggcgtcctcaaggtgcatccgcgatgtggcctgggttggagcctggctcctgttctcattggggtcctgcttccaggtgtgcgcggcctcgctgtgctgtgttgatctttcatctgctgatggacgcttggctgcttccaccttttggctgtgatgagttgtgttggcttttggaggcatttgtgtccgggcttttgtgtggacatgtttttatttctcctgggaatggaggtggtagtgtttttgaaggatttgaaaggcggtgtcttgattgtccagatgctaccgtgttggacagctaggttaataagaggtgttttctcctggacggtgccaggtcttgaggtctggaggtggactggcgtcgggctgcagctggccttgctgtgagtgtggcgtggagctgtggggacagcgctgctgttagcaggccgtcagcggtgctcagggcagacgcccccagggactggcggctcagcttccctgtgtgcgtgtttcttgtggttggtgagggagggacagagctcggcgctaggctttctcagcctggccgagtgtcgctgcctgccgcagagggtgccccccagcgccctgtggcctccctcaggccctgcctggagcccagcatggtggggactgcaggccctgcctcggggcgcccctgctggccgcctctggtcctgagagtggctgcagcccctgattttgagcttacatttctaggagactgcagcgtggcttgcaggtgtgtgttggtgtggccgcagtccccttggctgggcctggcctccccaagcggatgctggagcacgaggacctgtcccggcttctcaggaggtcctgcccgttctctgcgcatccctctcacggacccttctgcctgcagctcccagggctgcagccggtggggcctgggcctcctcctgctccttcactgcaagcggagctgtgttcattccattctttcttcacaggggctgggcgggctgggagtgccagggaggccgggggtccgcgctcacacctgttttccctttcagttggagagaggcgatttcctctcagaagagtggagggagcgaatcgccaacacgaggtatggccagcgtggggcatgcagggcatgtggggtgtgcgctcacaggcgggcggtggccatggcaccggggaccgggagcggcccctcgctcctgtgctggctgtggcaggaaagaggccggtggggacaggaagggcgcctttccctcacgctgggtctccctctgcgggcgcgcagagcagacgtgcccagcagagcccctgtcggccctgcagaccctgctggcagtgagcccgttcctgctgcctgtccccttgactttgggacactgtgggcccctctcgcctggtttcctgggcctcctccccgctcaggcttggtctgggggtcttcctgtctccatccatcccttctggagtggctggcacccacacagcactatgagggctgctcgagggagcggcccctcgtggtcccaaaagccatctctgcactgcctgggcttgcccctccgcgccacctcgcacccaggcctgggagctcagggcactgtccaggtccgtccccaccgccacctgtttgtcctggtggccacgggctctgtatggttgggctgggcccccgtgctttccactgcccagcctgggtgtggccacagcactccagcgtgtgccagggaccctggaggcccaaggcgcttgtgagggcagccggggaggtggggtcagcagccggctgggccctgctcccccagtcccgccatcctccctgctcccctcatcctcccagcactctttgtcctctctgcgcccctcgtcctccccacattcctcgtcctccccgcattcctcatcttccctgtattcctcgtcctccccgcattcttcatcctcccctcattcctcgtcctccccgcattcctcgtcctccccacgcctctcgtcctccccgcattcctcgtcctcccctcattcctcatcttccctgtattcctcttcctccccgcattcttcatcctcccctcattcctcgtcctccccgtattcctcatcctccccgcattcctcgtcctccccgcattcctcgtcctcccctcattcctcgtcgtcccctcattcctcgtcctccccgcattcctcgtcctccccgcattcctcgtcctccccgcattcctcgtcctccctgcattcctcgtcgtcccctcattcctcgtcctccccgcattcctcgtcctccccgcattcctcgtcctccccgcattcctcgtcctcccctcattcctcgtcctccccgcattcctcgtcctcccctcattcctcgtcctccccgcattcctcgtcctccctgcattcctcgtcctcccctcattcctcgtcctccccgcattcctcgtcctccccatgcccgtcatcctccctgtattcctcattctccctgcattcctcgtcctccctgcgcccgtcgtcctccccgctcccctccttctccctgcattcctcatcctccccatgcctctcgtcctccccgcaccctcgctcctgctgtcttccctgtgctcttcttcctcgggtgtgctcgtggcttgtggttgagtgtcccccatgggcagggtttggggaacaagtagaaaatgggggtttcttttcccaaaagtttcctaggttcgctctcctgtgtgaacttccatttgggttggggtgctgtgcccgccggcgggtgttctgccatctggagggaatcgtgctgaccctgtggtgtccccatcccatggggtggtggtgggagcgcagggggacccgcagtggtcaggccgtgattactgtcttataacaaactcttaagaagccgagagatttctggcgtcccgttgacatctgggctcggcccaggctctcacagttcctctccaggagctgccagcctcgctgccttgtcaggcagccccagccctaggctcagcctgctctggctctgggcacagcgtgcaggtcttgaccaggagggactcctcccacaggctgcccactggttgtgggatcttgcactgtctctggcctcagcctgttttccctttcctgggtctgactcacgatggtggtggctttggaggtgtgcatcacggagcttccttccctgaacacccagttacccaggtctttctggctcacaccgctcagccaccttggccacctgagctcagccgacctcacgtctagcctccctaagtgcggtcctgagtggggaacacgggcagcccaaggagcctcgtttgaggatgcctggcctgggaaagcagtgctgggcctgcaggggagcctctggttcccctgtccttgccagagtgtctgaaatgctgccaagggcgcctcacctgggacccgttgtctgcggtctctgcagcagttgagcgggagcctctgcttggcgccccctgttgcagtccagccccgtgctgggcctctgtttttggccacccaccttcttcccttggcctgtgggtacttcacggctgctcttcccaccttgtgtgggctgcttgtgaaccttcccagatcactggactccaagattcacaataagagacttggtcacgaatcctgccccctctgtttttggccccactcagaagaggctgcagttgccttttccctgcacctgaaacccacggcgtgcgctcagctgcgtgggcttggccctggaggtggcgggcgggtgtgggcagggcctagcaccgacagcagcggttgttggctgcgccgggtggctgtgcccgtgagacgagccttcatggcactgaactggagtattgttttgcagtgttatatttgtgaataattttgcctttggtcctgaggtggatcaccagctgaaggagcggtttgcaaacatgaaggaaggtaaggcgccctcctcgccggtctgtgctggtgtgacatgattgaggaagggtggccaggaggtccccgcagggtgtcctgcagaaggcagctcagacttggggtcttcagtccccttggagccaggtggtcttcctttatgcttttttttctttttttattgagacagttttcctctgtcacccaggctggagtgtagtggcacaatctctgctcactgcaacctccgcctcccgggttcaagcgattcttctgcgtcagtctcccgagtagctgggactacgggtctgtgccaccatgctcagctaatttttgtttttattttattttatttattttttgagacggagtctcactgtgtcccccaggctgtagtgcagtggcgcgatctcagcttaccgcaacctctgcctcccgggttcaagcaattctgcctcagcctcccaagtagctgggattacaggcacatgccaccatgcctggctaatttttgtacttttagtagagacaggatttcaccatgttggccaggctggtctcgaactcccgatgtcagggtgatctgcccgcctcggcccccgcaaagttttgagattacaggcgtgagccattgtgcccagccctggaatcttcttgagttgagcctacagcttgcttatggccagctgaccacccaggggcaagagtcccctttattcttgacctaagcacatggaacttggtgtccatactgagcaggagtggggctctcagctgttttgttttctccctccggagaaaggtcaccaggcccatgcagggcccttcacgctgttttctgaaccccaagccctggcgtagtttcaggagcggagaactcagcccatgacatcgattccagtcctgcagtcgagggtggtacccagaccacactctgtggactgcccattccctaaacatggagactgagcctgccattgtctcccagcccctgccagccctccagcaggacatagggcaggtttggggtcttccttgaggggattgtgctgcctgccttcctaggctctccaccaagccctgcagcaagcaccacctcatctgtatcctggcggacgtggcttccagagccactgctgggctcgaagacaggcgctctgggggtaccccctcttcctcccaactgctccccacctgtcctctctagggaggcctccagaggctaggggagaactgcggtgggctcctcaggcctcccaaacaaaacccagagggtctgcagctgccttcagcaccaacgccccacaacctgggggtttggagggtgcttgtgtgcctgtgtctgtgtgtgcgtgtctgtgtctctgtgcatgcctgtgtctctgtgtgtgcccgtgtgcctgtgtgtctgttagcgtgtctctgtgtgcgtgcctgtgcgtgcctgtgtctgcatgtctgtgcctgtgtgcatgcctgtgtgtgtgcgtgcccgtgtgcctccgtgtctatgtatgtgtctgcttgtttgtctgtgtgtgtgcatgcatgcctgtgtctctctgcgtctgtgtgccttgggagtttgtttgcatatctgtgtgtgtgtgtgcgtgtggcagtggtgtttctgacttatcttagaaccacgtgaggacaccatgcttccccgcccagtcgcccccacaccccagcagcactacgggcctccctgcaccctgcagctgcatgcaggaaggcagcagtggcttcaggcagctcctgtcaccccctccatggtcctcgtacccgctgccctagaacgcctcttctggctgtttctcgccagctttctctgcacgatcagacgtggtggctgagtcagggtactgcagtggcgtcttctgtccggcccctccctgttttgaacatgtccagtgaagggcaggtggccagtagtgctgattctaggggccttgatggtcccagacatgcccatgagcatttgttagcctggctctgcaaccattagacgtggccctgctcatgtttgaggtcctctggtagggatactggcctaacctgtgtgcccagcctggccctggaaccgcccttcctgctcctcctgaggggagtggtgtgtagaatgccaggcctgggctggtgtggcgtccaggggaggagagctgggatggcggagtgtgcatgtgtttaaatggatccactttgacttttaatttttttttttttggagacggagtctcactctgtcgcccaggctggagtgcagtggcgcagtttctggtcactgcaagctccgcctcccaggttcacgccattctcccgcctcagcctcccgagtagctgggactacaggcgcccgccaccacacctggctaatttttttgtatttttagtagagacagggtttcactgtgttagccaggatggtctcgatctcctgacctcgtgatctccctgcctcggcctcccaaagtgctgggttacaggcatgagccaccgcacctggcccacattttgacttttatgattaccttctttatatgtgtaaaaacagaaggctctgtttctctcggtcctgcgaagttcggctcctgacaccaagttcttcctgcagcacacacaagatgccccatagtggctggtgatagtgagactgacgcttagcagcagccttgcaggtgcctggctgacttttttgtatttttagtagagacggggtttcactgtgttggtcagactgaggctgaaggtgtccatccggtctgtttgtctttgcatttatcactgacagtcagttagaatcccagggttcagaggtatttgaaataattcttttcgcatgactgtttccagtttgcatctacagttagattttgttcctgcttgtgtacggcttgggggtttgctcttcctgcctctcaaaccttagttttttgttttgtttttttttgagacagggtcttcatccttggcccaggctggagtgcactggtgtgatcatagctccctgcagccttgacctcctgggctcaagtgatcctcctgccccagcctcccgagtagctgggatcacaggcatgcaccatcatgcccagctaattttttattttaattttttgtagagatggggtctccctgtgtcccaggctgggctggaacttctggcagtctgcccgccttggcctcccataatgctgggtttacaggcgtgagcctgtgcgcctggcagcgtagtgggttttttttttcttttgaggcagagtctctctctatcgcccaggctggagtgcagtggcgcgatctcgactcacttgcagcttccacctcccaggttcaagtgattctcctgcctcagcctcccgagtagctgggattacagatgtgcgccaccacacctggctagtttttgtatttttttagtagagacacggttttaccctgttagccaggctggcctcgggtgatccacctgcctcagcctcccaaagtgctgggattacaggcatgagccactgcaccgcgccgagaatgttttttaaagaagcattatttgtaggaggttgggcgtggtggctcacttgaggccaggagttccagacaagcctggccagcagggtgaaacccgctctctactaaaaatccaaaaattagccaggtgtggtggtgtgcgcctgtaatcacagctactcgcaaggctgaggcaggagaaccgcttgaaccagggaggtggaggttgcagtgagccgggagactctgtctcaaaaaaaaaaaaaaaaaaaaaaagttatttgtagaataggcttcaacttggaaggtgtttcctagtgttgcttgtaggcaggtggacaggacccggagcccagtgtgtgtgtgttccgtgtcattgttccttctctgtcaccttgagtggtgtctgctcttctgtttcctctctcctgtgtggcagtaagcagtgtctgtgtttcaggtggcagaatcgtgtcctcgaaaccctttgcacctctgaacttcagaataaacagtagaaacttgagtggtaagaaactctcatgttgttaatgatgaacacgggtaattttaaccatctgacacgcagtattcctaggtccctcttccttgaccctgtggacactggggctggatccttctgtggggtggggctgtcctgggcagtgcagggtgctgagcagcgtccctggtgtccacccactccatgccaggagcacccctggtcgcgacaaccacacacgtccccatagagcactgtgtgccatgggggtagaatcactcctcggggagaccccggcttcgaggggaggcgtgaaggatttacaggacttttgtggacagagacaggcccacggtgggaaggagccggcccctcccatgccccctgcctgccttactgtgctgcgtgctctgtcagctcccagccttgcggggcagcacggcctcctctgaggggcttccctgaggagcgcccacccgggaggtgcctgtgttgctggatgctggccgttcttgcagccgtgatctaagtcgcttccagatcttctccccctccttttccattccactcagctgggtttgtggctgtttttctgaggttggaggggcccaggccaggtggtgttgaatggtgcacctccctgggccggcctctgtgggccactgtggcctgacgcagtgtgggagaagagggaagacgcgcagctcaggcttctgtccccacgcctgccctggggtgggtgaggtctgcatggaggggctgtgggcaggcgcaggccccggcctcacctgtggctcctgcagacatcggcaccatcatgcgcgtggtggagctctcgcccctgaagggctcggtgtcgtggacggggaagccagtctcctactacctgcacactatcgaccgcaccatagtgagtatctcgctgcgcctcagccgcagggccgtcctggtcttccaccccgcccacgtcacactgctctctcctttctcatgtggcctctgagaccctcccctcagagccctcaacgccccccggcccctgagctcaggcccagctcctcaaggcccctcagtactgcttgcaccgcaggacccaccagggtcctcccaggcactgggcgtgtcctgggtgagggctgagtgctgtctcccctagtctacgctcagctcctggggtggggcggggccatcagagtgatgtgtgaccataagggtcccggccgccatatccagaggcccctgtggataggagtcccacgtccctgttcccagcttcctccatgtgagagggtcctgagcggggagacaccagggtccatgggtggggtctgggatgcttcttccctccctgtgttccccagggtcctctgacacagccctgggccagtgtgcggcctgcctgcctcccacggtgcttcccccccgggcacgagtatcccgagcctcctggcatgtgggcagcgccagccctccagggctgggaggcttcccctggtctctttcccgtcctttggttgggcactctgttcctgttgttggggtagcggtggttttccttacggtggtgctggtgtgtctgcaccctcactgtccagtgctcggagcctccactagagcctgcctggggagcgctggtgccgtctggggaccgacagccccaggcagatgcaccccgccctcccactgctcccccgagggccctgggacgagaggcatggtgagctgaggctgaggctctgggggcttggcctaccgtgcggcccccacctccacgcagtgctgctgcttcagctgccctggcactgacgccctcggcgcagcctctcgccttctcctctgaggcgggcgcggttcttctgtgcagaaagccctccctcttccagaagcagagacacatcccagggccctgtgtctgttctgaaggcttaaaccagccccgcccacccgtcgcgtgctggtgaattgagggtgacgcctggccacagctgggttagtcacatccgcgtttgccactggggggctctagctgcatgcctgctgtccccagataccagaacagcctccccagccactgtccaggttgctgttgttacctgggtgtccagacaaatccgaacagagattgggactcccttctaatcagggttctctttcttctttttagcttgaaaactatttttctagtctgaaaaacccaaaactcagggtaagtttgtgtgttttttctcttgggttaataacacgcatgcactgatgtggggaaatgcaaagccgtgcgcagccgggttcaggagccacgactggagcacagccctgccgcccctcggggcccggccctgtgccctttcccgcctccttcctgctcctccccactgtcactcctggtcctctccctaccctttcctccctgtcctccccctcttcctctcctctcccagcccttttctctcaccattcaatctctctctctctcccccaccctccctctccgtttctctctctctcccaccctctctctgtctctttgcctgtcttcatgctttgccttgtctttgatggtttggcctgggacatccttccccttgttaatacttatttttggggaggtggcttggcttagttttggtggtggggtgagttgcactgaagggctgggtgggtgaaaagcttgtgcgtcactgctggctgccccctcttgaggcctggggggccacacatgtgcgcttgtcccaccctcggtgcagagtgcagctcctgggcccccgcgccctgcacgcgctgcaccgtcggaggcagggctgtcccctcctctcccaccttaaagcagcggtgggaaagcctggcttggggagccacagtggccgccctgcccgctggcgcttctgcagcctcagacctgcctgcttatttgccaccaaagctgagaggatgtttgtccgggcgtcctttccttttggagggggtcagacaagaccagcatgcggagaaccccgtacaggaagggctctgtcactgcctggatttgtagccagggctgggctccaacccggcctcagagcctggtacccctcgggggccctctgtccttcccaccatgcttagggggatgtgggtcttccctggagagcagggaacggcccgaggtggccggcgcaccctgtgttccccttcccgtgggtcgcgccctccactaactcacatcagagaacttgtgcatggcgtcccatgtgtgggcctcggtgcctttcgaagagaggagagagggcaggggaggctgtgggctgtggcttctaggtcctgctgcctgaggggcttctcgtctcctgtcttggatgtggttctttttctctgtggctcacagtctggcttcttactgacaggcatctgtgattgtgggagtggctgtgaatgccgttatccgtgcccacgggtcacgtcctggcctgcggggccccaagcagcccactgctgtctctgggcctcagtttcctgatttgtgccacagaggacttgcagtggacagagttgggcccgtggcccccttgagtctgagctccgcgtgcctctcggtgcaggagggccgtgggcagcgctggggcttcctgtggctcaacctgctctccttccaggaggaacaggaggcagcccggcgccgccagcagcgcgagagcaagagcaacgcggccacgcccactaagggcccagagggcaaggtggccggccccgccgacgcccccatggtaaggccccagcctggctcctgctgctggagggcacccgccccctgcccgggagaccccatgggtgggaggctctgtgcccatccctgttcttcccttgtgtcctccaggactctggtgctgaggaagagaaggcgggagcagccaccgtgaagaagccgtctccctccaaagcccgcaagaagaagctaaacaagaaggggaggaagatggctggccgcaagcgcgggcgccccaagaagatgaacactgcgaaccccgagcggaagcccaagaagaaccaaactgcactggatgccctgcacgctcagaccgtgtctcagacggcggcctcctcaccccagggtgagccgcccccacgccacggcccccgctctccccgagtgcggatgcctggggtcccctctgctgggacgctgccctcctgagccccgtgtgttcagggtgtccctggagcctccctgttgtggctgtgccttcagggtggccccatcctaaggggttgctgggcacctgccccatgctgacgcctctgcccaccgctctcccgacccgccctgtgctgacgcctgccctccgctctcccagatgcctacagatcccctcacagcccgttctaccagctacctccgagcgtgcagcggcactcccccaacccgctgctggtggcgcccaccccgcccgcgctgcagaagcttctaggtgagcccgtgtgaggcgtccggcgaagggttctgggcttggggtcatcccaggaggaccgtgggttgtgacgctgacctcgcagcagcccccgtgacctccatgctggaccccactgaagtttacccagggttggggtctgcctgctgcaggggtcagtagaggctcagatgcagcctgtgggttgtctgaggtcttacccaggagatgctgggtgacacttgggacgtctgcagttgtcataacttagggatgttgctggcatggggtgggtgcaggccagggatgctgctcagggccttgcagtgcccaggatggccccacgcggtgaacacttggctgcgcaggggtcagagggcctgagtgctctgcgagcttggggcgtgtggcatgggccccgccaggctctgctgagctcctgcctcatgagtgcctgacacctgccgaggcctgggactcgttctcaagggctgctcccacctcttccctctcagtctcagctgctctcttctcacctgtgttccgcctctcttcccagagtccttcaagatccagtacctgcagttcctggcatacacaaagaccccccagtacaaggccagcctgcaggagctgctgggccaggagaaggtgggtcctggcccccttggcattccgccttcccgcacagaggcagttcgttcctgttcctgggcatctgtcccctgtggcagaggccctggagcgcaggcctgagtgggctccctcctctgctcacctgctgcgagaaacaaacctacccgtttaaacccaaagaatggactgagagacccggaaaacagcgaaaatgagacttttaatcatggttttgcaagacctggtgtctgataggcacacccagcacagtttgaacaagcaaccttccccctagtgcacaggtccctcccccggttcctcaaaggctgagtactgtgaggtcacagtcttcccagttgtcgcctattggttcggcaggggctggagtgcagtggtgtgatctcggctcactgcaaactccgcctcccgggttcacgccattctcctgcctcagcctcccaagtagctgggactacaggcacccaccaccacatccggctaattttttgtatttttagtagagacggggtctcactgtgttggccaggatggtcttgatctcctaatctcgtgatcctcccgcctcggactcccaaagtgctgggattacaggcatgagccaccacgcccggttgtaggtgttttctttagggttgtcctgctgcattttgtgcattgcaatcccagtcagctcagggactgttcaagtatttgacttatgatctaagtagctgggcaggctgattaagaacagacaaagccagctcttttgcaggctggtaaaccttcatcttaggctaaacttctttggttcgggtgagggcaactaagccgggggaagcgggggcaggggaggctgacaagcaggcatcagcgatccaagcaggggcctagtacatgctgtctcttctgtagtttgctgacctaagccaattcaaggcagtttgtcctggaaatggaccactgtatacatgatttccttcacctgaggtcccggctgtggggccccgccctgggagtctccgaggacctgctttagtggggagctagggccgggctatggggtggaagttctggcggcccagagataactccaaaagccattggagccacaaggtcggctgtccctgagccctggtttgcattttggactttggctttgcttttaaaaaaaagcttacagcgtgctttgagcatatatgcacatgcattgctcactgtgtagctgacagcatgcctgggccggggccctgttctctgctggtgtctgaaggttgtcctgtgtcagtggctcctggggtcttcccttggaggtgggcctccggacactgagtgtttgctgttacgctgcagaaggcttccttgcagatccatgtgaaaagtccatcccctggtattgccttgggataaactccttggcattggccggcctctgcgtggctgggggcgctgccctggctgagtccaggtggggtggcaggtgcagtccctccagctggcgagagttctttgcagtgaacctgatgcagagctggtcccctcccgccgtggcctgagtatttcttgacatctcagcccggtgtgggtcccctcaggcatgtctgtccttgagcgtgtcttcaggaagcatgagaggcagggcgtgggccctccctgtgggccctcagtcacctgccctggcccttagtcacctgccctgtttgtcctacaggagaagaacgcccagctcctgggtgcggctcagcagctcctcagccactgccaggcccagaaggaggagatcaggaggctgtttcagcaaaaattggatgaggtagtggaccccagagggcaggtggcaggtggcagctggggcgcaggctggggtggtccatgtccgtcggtatggcttcctgtggcttcctgtctatgcctctgtccagctgtgtcccaggggctgggctgcaggggtggtcatgcctgggggcttacttcaccttggaggccaccagcatgacctctcccccgccccatgtccccagctgggtgtgaaggcgctgacctacaacgacctgattcaagcgcagaaggagatctccgcccataaccagcagctgcgggagcagtcggagcagctggagcaggacaaccgcgcgctccgcggccagagcttgcagctggtgggtgccgcggcgcaaggacagggacgtggaaccagaggggccctgcctgggcgggtgtgtcctctgtgcgggtgggaggctctggaaggcccgcctctgttgtggggtttgttcccagacgaattgcgccacctgtgaaagcttgtcgagcgcgtcacagcaggcaggcctgggcccctcggctggatggtttctcagcggccctgggtgtcatggagccacactctggcaggctcgaggtgtggggtcatgcgagcatcccaccatcgtggtgtgggtgctggagctgcctcatctgtccgtggggggccccagtctccgcgtgttccgcatcctcagcctgctattccagaaacggggtctgtgccctaagcacacatgctgttggctgaggcaggcccagggaaccctgccctgagagtgtggggtgtgctgggcaggcagccagccagtcgcaactgtcccatccctatcccctcagctcaaggctcgctgcgaggagctgcagctggactgggccacgctgtcgctggagaagctgttgaaggagaagcaggccctgaagagccagatctcggagaagcagaggcactgcctggagctgcaggtgggctgcgcgcgaggctgcactccgtggtgtccgagcctctcccatcagcctccctgtgacgtcgttgagcctagggtggttgcggttgcagcagcctaggaagaaggtggaggaggacagttgggtggaggcttatggaaccttctgtcttgggccgcaggctgcccgtgtggatgactctgcctcactctagccctcagctctcgggggcatctcgggattgcttggctgaatgcgcagcgctaacctaggatttcctgatttcctggctgcctccttgcaaatcatttctgtaacagtcataggggagaatttgctcattagaaaaacagctggatcggtgcaggggcttatgcctgtaatcccagcaccttgggaggctgaggcgggcagatcacctgaggctaggagttggagaacagcctggccaacacagtgggactctgtctctagcaaaaatacaaaaattagccgggtgtggtggtgtgtgcctatagtcccagctcccagggaggctgaggcaggagttctggctcccaggatggcatccccaagggccatattgaggcaaaaagggccgtgtttgagcccgggaggtggaggctgcagcaagctgagattgcaccactgcactccagcctgggtgacagagccaggccccatctgaaaaataaaatagcttgtactttctgacaccgagaaacgcattcgtggaggccgagtagaggaagtgtggaggagggtgtgcagcgggaaggtgctctcctccctgctcccaggcagaggcaggtgctggtgggcggtgcccacagctgccgtgcagcctagaaagcagcaggtcacgggctttgttcccagagccccatcccgtcgacactgtgcccgcctgctcaccttacgtgtccccagcgtggtttcactgttgatggacctggtgccctgtcgctggacctctgctgccttttcaaatgactgcaccaaaccgttgctgcaaggctgtccccggaggcgggctctcacgggcggctgacggacgtcgggaagcaccactcacgtgctcccgagctgctccctcacgtgtgtggcccaggcgagcctcaccagcgtacattagagaaacggaggtcgccgacctctttaccacagccgggccctgtgggtctgcctggagtagagccctcgggaagagcatatttgggttctgaccatttttgtcatcatcttttctgtgtaataaaaaaacaatgtgtttgttaaaagaaaggaaagcaggtaaacagaacagataaactaaaaggaaaaagcccctctcagactcagcgcccggggaagctgccacgctcgagtggcgtgtccctccacaggttttacacttagtgaaactggatgttttacacttagagtctattttgagagacgagagctctttgtatcttcctgttgctctttttgaagaaggtgcttccatgtcagcaaaaaccatcctcggccctccacatgactttatttgacgcccccagcttcccgaccccgcctctatgtggtcggcagctttggtttttccatcccacacaagcagcgggggtcctggccacccctccgggtgtccatctgtggcagtcttggttccctggagtggtcccccggtggggcgggcctgacaccatctctcctcctgcagatcagcattgtggagctagagaagagccagcggcagcaggagctcctgcagctcaagtcctgtgtgccgcctgacgacgccctgtccctgcacctgcgtgggaagggcgccctgggccgcgagctggagcctgacgccagccggctgcacctggagctggactgcaccaagttctcgctgcctcacttgagcagcatgagcccggagctctccatgaacggccaggctgctggctatgagctctgcggtgtgctgagccggccttcgtcgaagcagaacacgccccagtacctggcctcacccctggaccaggaggtggtgccctgtacccctagccacgtcggccggccgcgcctggagaagctgtctggcctagccgcacccgactacactaggctgtccccggccaagattgtgctgaggcggcacctgagccaggaccacacggtgcccggcaggccggctgccagtgagctgcattcgaggtgagtgccctggtggggctgggggtctgcagctggtacctgccgactctgcctggtgtgctcaggctgtcgggttctcagcaggagtgtgtttgttgaggagactgaggtggggaggtgctgggccaggccgctgcctctgagtgccagcccacggccctcgagagtgactgcagcttctcattccagagctgagcacaccaaggagaacggccttccctaccagagccccagcgtgcctggcagcatgaagctgagccctcaggacccgcggcccctgtcccctggggccttgcagcttgctggagagaagagcagtgagaaggtgcgggccgcgacccctgccccgggctcagggaggtgctcagcagaggcggcctgagcgagttgctagcaggagggcttgtcctagttgaccttggggcacggtgaggtactggggctgacctggagtaggatgttgtggcagagttgggggcaaccagtaaggacaggtcacaggtgacgttgggcaggtgccatggaggacatggggtttgtcagggtgtccctgatgcctcttagttctcagtgacggacggcaagtgctggtagagacacagagcccagtttgggaggccgctgcccatgaggacttccccgggggcactggcctgtgtgcacagggatggagagggaaggacggtgacgttgcatggacttggcagtgatggatgtgggccctgggaggcttggtggccccacgggtgactgcccaccgagccgggcgggcaggctggaggggacagatgggcattgctttcagacaccaggagcgtgccgtccctctggagtgtcccaaagccggtgtccaggagggcctgactgcgtggggaaggttgcagggccttggcagcgtgggggccgccttgagagagctgtagcaggcccccgtcctgtggctgtggtccctgtgtcctggaggggtttgttgacccacgactgggggtcgggccttcgtctgcagggcctgagagagcgcgcctacggcagcagcggggagctcatcaccagcctgcccatcagcatcccgctcagcaccgtgcagcccaacaagctcccggtcagcattcccctggccagcgtggtgctgcccagccgcgccgagagggcggtgagtggctcccaggtggctgtccccaagggccacgttgaggcaaaacagtctggggtgctcgagacctggctcactttgcgaagtctcacgctgtaaaatgtcgagcgtgaggcaatgcagtcaaggtgggctgtccaaagccggggcgtgtccggtgacctgggccgttgttttcgccagtctttttcttttgggtgaaaggtacgtgtgcaagtggagagggcctcacaccttctgggttgaggaggagctcagaggcccaccctggctcccagcctcactcctcacgaggccacattggctgccgtggcccctgtcctcacagctgcctctgggttctcccacccagcgctgtgcatgcagagaatctcgtcttgtgtagcatgggcgggattttctgggcattgaactattttttaaaaattgtgcgcttcaagtatatgcttcagtggtttttagcatttattttttattttttatttttatttttcagacggagtctcactctgtcgcccaggctggagtgcagtggtgcgatctcggctcactgcaagctccacctcccgggttcacgccattctcctgcctcagcctcccgagtagctgggactacaggcgcccgccaccacgcctggctaattttttgtatttttagtagagatggggtttcaccgtgttagccaggatggtcttgatctcctgacctagtgatccgcccgcctgggcctcccaaagtgctgggattacaggcgtgagccacgacgtctggcctctttctttttttttatttttcgagatggagactcattctgtcccccaggctggagtgcaattgtgtgatctcggctcactgcaatctctgcctcccaggttcatgccattctcctgcctcagcctcccgagtagctgggattacaggtgcccaccaccacgcccggttaatccccgcccccaccagctgagacggagtcttgctctgttgcccaggctggagggcagtggcacgatcttgtgatctttactcactgcagcctccgcctgctgggttcaagcagttctcctgcctcagcctcccgagtagctgggattacaggcatgcaccactatgcccagctgatttttgtatttttagtagagacagggtttcaccatcttggccgagctggtctcaaactcctgacctcaggtgatctgcccacctcagcctccgaaattgatgggatgacaggcatgagccaccgcacccggccaatttttgtatttttaatagaggtggaggttttgccctgttggccagggtggtctcgaactcctggcctcagtcgacccacccgcctcggcctcccacagtgctgggattccaagtgtcagcccccgtgcccggccggttttttgtacttttatacacctctgtctaattcaggacattttcttcacccgggaaaaagcgttgcccgcctcagcagtcactccctagtcgtcccccagcccccgggcccccgaacacgctcatgtctgggcctgtcccttctcttggcacgtgagggcattccctgtgtggatggagtgtgccatcttcatccgtgcccagttgatggaccccggcttgattccctgttttggcgattgtgaatcgttctgctgtgagcgctggggtccaggtttctgtgtggatgtaggtttgctctttggcccatgtgggagtggagctactgggttctgcggtcactctactgacctttgttggacttggagtgtggtgtggggaagtgcagtgggtggtggccggcaggtgtgttctcgcaagcgccctcctcaccccacccgactgctggcatttgtgctgcttggagaacacagccgcttcccggtgagggcgggctgtgggttgcttgggttgtgcccagtaccccctccccacagctggaccccgggacccccgcctcctgacctccctgcctcaggcccgctgcccattcacacgcaggcaccgcgcactctcgctgcgccactcgcctggggccccgctcaagttcccccgctgccctcttcccacgcggtactggacggtgaccccggcggcctcccccagccagctgcaggcctcaacactcactgtttccagctgggttctgggtctcctggggcacctgctgcccctgacacacagggttttctctctgcagaggagcacccccagtcccgtgctgcagccccgtgacccctcgtccacacttgaaaagcagattggtgctaatgcccacggtgctgggagcagaagccttgccctggcccccgcaggtaacgcccctcctgtgccctaccctcaggactctgctgctgctgctgctcttcaggcaggagggctgggttgctgggagtggaacagggcttcctggggtgatcatgggggctgctgccccaaaccgccacgcctcattactgacaccctttcctgcatcccacgagctgggatgcggatcgggctcagctgcagccatctcggcctcatacctgggtctcccgacactgacacctcctgcttgggtgtattaattcagcccgtgaggtcggccccagtgctctcgggggctcctgtactcacagctgggaggcccctgactcaggatcggctccacacacagcagtgcccaatggcacacgaccgtgggcctccgtgctggtagcggcatggtttctggttccttgagaaggtgccgcctgagcagtctctgctgttagcccagtttctgcagagagccagagaggatgccactttggcttttgttgacactgcaggcctgtctgttgtggaagccgcagagacagcatgtcagcgggcatggctgtgtgccagcaaaactgtacttaaaacagcagaggacatgagacccccaggctggtttgctggccccaggttgagatgcggtatgatgcggcagctacttttttaggagtaaaaagtaaaatgtggccgggcgtggtggctcatgcctgtaatcccagcaccttgggatgccgaggtgggcggatcacctgaggacaggagtttgagaccagcctggccaacatggtgaaaccaccgtctgtactaaaaatacaaaaattagccggatgtggtggcagacgcctgtaatcccagccactcgagaggctgaggcaggagaatcgtttgatcctgggaggtggaggttgcagtgagctgagatcgcaccactgcactcccgcctgggcaaaaagagtaaaactccatctcaaaaacaaaacaacaacaaaacaagtaaaatgtacatggccgctattgagacaggaggggctctagggaggctgggcaggcttcacggttggccacgtgagggccctggagaggccaccgaagcccgggcagttctgccctcgcagggctgggttgtgcccttggggtgaggtctgctctgcgagaggcagtgacagtttcaggagattttcaactgggtggcaaacagccaactccagaagcgccttgctgcgcccctgcactgaggcctcattggcagaagcagggaggccgccctttgtccccgggtggtcatggaagtgcaccactcatcgtgggctgggaagcatggctgcggccttcaaggcggccatagcttggagtatccaagctgagttgtcttctgagaacaggagggagggaggccacgcagccatgggctttcctcatggtgtctctgagatcacggggccagagggcaacttactcagaggaagcctagctcagcggggagcccgcaccaggaggcttcttgggaggcagcgtctcagccgggacctgcagggcacaggcagcccagatgggcgggaggaggcacagggtcagccctgagccttgagcttgcccacagagccttctggttccaccccagaggggccgttttcagactcccaaccccttccccacttccccgcctctcctggagcccacagagctcctagggggtggtgctcccacagcaaggctttctctttggccatcctgtgtcccctgagacccccatgtccttcccggcaggcttctcctacgctggctcggtggccatcagcggggccttggcgggcagcccggcctctctcacacctggagccgagccggccaccttggatgagtcctccagctctgggagcctttttgccaccgtggggtcccgcagctccacgccacagcaccccctgctgctggcacagccccggaactcgcttcctgcctctcccgcccaccagctctcctccagtccccggcttggtggggccgcccagggcccgttgcccgaggccagcaagggagacctgccctccgattccggcttctcagatcctgagagtgaagccaagaggaggattgtgttcaccatcaccactggtgcgggcagtgccaagcagtcgccctccagcaagcacagccccctgaccgccagcgcccgtggggactgtgtgccgagccacgggcaggacagtcgcaggcgcggccggcggaagcgagcatctgcggggacgcccagcttgagcgcaggcgtgtcccccaagcgccgagccctgccgtccgtcgctggccttttcacacagccttcggggtctcccctcaacctcaactccatggtaaggatggggaccggcagggctggggagcgcggcctgtgaaagaaagaccagagggagaccgggcgcggtggctcacgcctgtaatcccagcattttgggaggccgaggcgggtggatcacaagatcaggacatcaagaccatcctggctaacacggtgaaaccccgtctctaccaaaaatacaaaagattagccgggcgtggtggcgggtgcctgggaggctgaggcaggagaatgatgtgaacccgggaggcggggcttgcagtgaactgagatcggccactgcctgggccacagagcgagactccctctcggggggacaaaaaaaaacacaaaaaaaaacaggtggaggcagggggccatgactgagcccggccatcctccaccacgtgcggcctggcagcctgggaagaggcggccgacagctgtctctggggttcggagtgcgatgcgctgcctgcaagcttcttcattctcggctgtggggccttagtggtggtgggcacatcaggagggggcatggggggctctgggattgcggggtggtgtgtgaggaccaggaagaaccaggacaggggctgtactggccgctgggcagggcatcagtttcctcaggagaccctggggtgcagacaggagcctcctggggcgggggggctctcctgccttggggtcccgggtctgtggtatgtgcatccattgtgtctgtctgccctcaggtcagtaacatcaaccagcccctggagattacagccatctcgtccccggagacctccctgaagagctcccctgtgccctaccaggaccacgaccagccccccgtgctcaagaaggagcggcctctgagccagaccaatggggcacactactccccactcacctcagacgaggagccaggctctgaggacgagcccagcagtgctcggcgagtccaggggcccggaggggggcggggcctggcagcaggggcaggaggtgcctgctcactgtgtgtgtgtgggtgggtgggtggggaggaccggcaggctcttagggggtgccctggatgggaggaaggcgtctgttttgtgaggggcctccccacaggtcctgggccccgttccgggcagggccggcctcccgggccattcggggtgggacacgagcagggccatcggttagaagaggcaagctgaggaggagctgagcgcagcaggagagaagcttcagcagtgaggcgttggaggtctcatccacacgtcttgccgagtgtattacagtagctttattagataaaattcacatatcgtattctccatttaaagtgtgcaattcagaggtctttggtatatccacattaccactgcctaaatccagaaccttccatcatgtcctgagaaaatctcatcatccccttgaaacactcactccccttctcctcccaagagcccctggcaccccccgcccccatcctactttctgtctctgaatctgagggctctagggacctcctaggagcggagtcacacaggatgtggccttttgtgtctggcatctctcactgagcgtgacgtcctcaaggtgcatcctcggtccctgtcgtggctgggtggtgctccaccatccatccgccctccgtgctaggcttgcttaccctgggcggttgtgagcagcactgctgtggccatgggtgtgcgtgtttgtgtttgggagcaagtttcccgtttcctggtgcctgggcggaggtgctgggtggcccggccccctgggctctccagcagccacaccattccaccctgccaccatgggtgcacgagggtctgaggtcctcagtccccacatcctcaacacactgaatttcttgttttgattctagccatccgagtcgtcgtgaagtgatataacatggtagggttttttgcttttttttttttttttttcctgagacacagagttttggtctgtggcccaggctggagtgcggtggcgcgatctcggctcactgaccctccgcctcctgggttcaagtgattctcctgcctcagcctcctgagtagttgtgtctacaggcacacgctaccaccgtgcctcgttcgtttttttgttttatagagatcgggttttgccatgttgcccaggctggtctcaaactcctggcctcaagccttctgcctcccagtgcctcccagcgtgcgccatcacagccggccctaagtgtgcttttggtggtgttctgtgttagttcgttctgctccttgcccacgtgtgcgtgcacgtgttacacgagaaacattgtagcacctggatgctctgttttgcattgggattgctcagcttagtggtttccaggatctttaggaatttgtgtgtccctggtgtgttcttgggacattggatcaaagcgaccccatgcagtgtgtggttgggcatgtcttcacgtgctggcctgcaatgctgtggcattgtttgccacctgaggcaccgaggtctgagaggggccgggagagggaggtaggaagagagctctgtctgggattctcacacttctgtgtgctgggaaattgcttctcccattcagctgctgtgcctgatctcttggctgcttgtcccagcagaggccctggagtccctgccaggacagtacccttgtggcacaacaggggtggatcccagggcccagccacccagtccaggcctggcccagggtggctgcacgggtcccctgtctgggccgagtgcttctcgttcaccacctccggagctccctgggctgttggctgtcagcatttgtgtcattcttagtatgcagctgggtttcaagcattaatgacctttttttcttaacagaattgagagaaaaattgcaacaatctccttagaaagcaaatctcccccgaaaaccttggaaaatggtgagtaacaagtgttttgcggcgtggccaggcctgtccgtgtggccgtggtgcccagtcagtgctgctgacccacctgctggcccgctgcatcgtgtcccgcatggtgctggcccgctgcgtcgtgtcctgcgtggtgctggcctgctgcgtcgtgtcctgcgtgggcgccgacactgggggcgctgggcttccagaactgcctctgggaggccctcactgcagcccagggcctccgcgcacacgccatgctctcacagtgggtggctgacctgcggggatcgtcaccttgggtcccctgtttgctttgcaccctggccttccccccgagtggtgcctgcgtcctcagtgaggaccctgacctgctctggggcagccccaccttccctcccgcaggctgctgacctcagcattttccccagagctcatcccgcatggcctctgagacccgcttcagctgcctctgtcctgtcttccgccctcctgtcccatccagtcccgtcccctgccatctcatcctgtgctgtagtcctcctgtcccatcccatcttgtcccctcccgtccccttccctcctgtcctctcccatcctgtcccgcttggcatcttgagtgtctgtgaccagccctgcctgcagagttgcccgggccgtggcagcagccccggttagcctcatgggtagcccgggcaggtgctctgggctcacggcttctgcctttcctctttgccaggtggtggcttggcgggaaggaagcccgcgcccgccggcgagccagtcaatagcagcaagtggaagtccaccttctcgcccatctccgacatcggcctggccaagtcggcggacagcccgctgcaggccagctccgccctcagccagaactccctgttcacgttccggcccgccctggaggagccctctgccgatgccaagctggccgctcaccccaggaaaggctttcccggctccctgtcgggggctgacggactcagcccgggcaccaaccctgccaacggctgcaccttcggcgggggcctggccgcggacctgagtttacacagcttcagtgatggtgcttctcttccccacaagggccccgaggcggccggcctgagctccccgctgagcttcccctcgcagcgcggcaaggagggctcggacgccaaccctttcctgagcaagaggcagctggacggcctggctgggctgaagggcgagggcagccgcggcaaggaggcaggggagggcggcctaccgctgtgcgggcccacggacaagaccccactgctgagcggcaaggccgccaaggcccgggaccgcgaggtcgacctcaagaatggccacaacctcttcatctctgcggcggccgtgcctcccggaagcctcctcagcggccccggcctggccccggcggcgtcctccgcaggcggcgcggcgtcctccgcccagacgcaccggtccttcctgggccccttcccgccgggaccgcagttcgcgctcggccccatgtccctgcaggccaacctcggctccgtggccggctcctccgtgctgcagtcgctgttcagctctgtgccggccgccgcaggcctggtgcacgtgtcgtccgctgccaccagactgaccaactcgcacgccatgggcagcttttccggggtggcaggcggcacagttggaggtaggcagggcggccgtccgtccgccccccgccccggcccccgccggaggccccttcctttgcaggttcccttccgcactctcttgcagcaggagctgagctgcaggtcccctggtgccggccggcccccgccatccgtgcacggtggcgaactccagtcctgtggggagagggctcacgctgagtccgtgtgtcttgggttctctggttgtaaccgcgtccctcttgttttcagaaggccaccgtgcgcagggccaccagagcattactttctcccgtggaggtcacctgctaggtgtggccgcccgggctctggcaaggctctgggagctggtgttgggtaagagcgagtccccgcagtgcctgcccagacagggcggagaggagccgccggggggagcggcctggccctggggctgctgcggggcggggggccggagggcggagggcgggccaccacgagcctggccgagccgctgcttgtgcttggtgcccgcacacgcctggcggcgccgtttcgcttccctttttgtgagcctgcggctgctgctctgcgcttgcctggatgctgccgcttgttgaagctgcgtttttctctcctatttgcaggtgtctttaaccacgcggtgccctccgcctctgctcatccgtttggagcccgtgtcggccgcggggctgcatgtggcagcgccacactgggcccgagcccgctgcaggcggcggccagcgcctcggcctcttcctttcaggccccggcctcggttgagacccggccgccccctccgcctccgcctccgcctcccccgctgcccccgcctgcgcacctgggccggtcccccgcggggccgcccgtcctccacgccccccctccacctaacgccgccttgcctcctcccccaacgctgctggcctctaaccctgagcccgcgcttctgcagagcctcgcgtccctcccgcctaaccaagctttcttgccccccacctctgctgcctctctgccgcctgctaacgcctctttgtctatcaagctcacctccctcccgcacaagggcgcccgcccctccttcacggtgcaccaccagcccctgccccggctggccctggcccaggccgcgcccgggatcccacaggccagcgccacggggccgtccgcggtgtgggtgtccctcggcatgccgcctccctatgccgcgcacctttcgggggttaagccgcgataaagaccttgcttagctagcagtgcgtattgtgtaaggtaaggccagagccctgcgcggtggctcactccagacactgaactgtccttcctttggcagagaagacggccacagggctcggcagaagttccgggggtcctgaggagggaagagggagagagccagggagaccagggagatggtcgcgagaggagggactacaggacgggcaccagccatggagtggcctgagtgtgttgggttccagctgcccgcagctgggttcctgcggtgacgccgcaggactgaggccagccctgggggcagctgtgccagcccctgtgggcgaggctcacggggtgccaggccagggggctgggagctctagctcctagagcagtctccagggctccatccgcaccaggcccaggtcactcatgacgggtggcgtggcttggtgctgttccccaggcgcccagcatgtagcaggcacggtgccggctgcagaggtcctggagagccagggtggctggctggatgcctctggtcggggctgtctggccagtagcctcggatgccctcatagggagccagtgaagccccaagtgccctgcctgcctgggggctgatgggttcccggcggggtcgagaggcaagctctgtgccctgcgtgttgaggcccccttgctggacacggctgatggccacactgccctgtggtcatggcccacagccgaggggctttcagctgctcagatgtcagcaccaagctgggcaggttagtgtagacggtgcccacctttgagaccagaaggaagttggaagcaggagtgattttgatgatgtgaggccttcagggaatgtcctgttcactcctcccccaagaggctgtggagactgtggccgctgacccctgagggcagttggccacccgtgccctccagggacatggcgtgcctggcggcgtagtgcaaaggtgccctctgcttgcccctggccttctgcctcaggggcccctgggacacaggccttcctgggcgagtccaaagcccaccgggcaaggagaggaggactgggagccaggagccaaggcggaggctgtggccagggctggtcagcctggcgggtcaatgcgggcacctgcgggctggacaagctatgctgggtctcttaggagatgagctgcaggtagggtggctttagctggactcggctgtgtgtctcctttggaggaaggctggagcttggccggcgtgtccaggtgtcaggctccctggtctgtcacggggcacgcccgtcgtctgttgtggttagaggagctggcactatgcctgtcatggtgctggccccaggtggcgtgtgtgctcgtgggaggcctcggtccccagcctgggtgagtgttgggctcccccaggcgcgatggtaacctcaggccgctcttcccgctgtgcccttctgcaggtaactaggatttctacctcaaccgcgagacctatgcaaggacggtgtggaccaactcgcgcccgcggcatggtgcccgccggcctgccgggctcccacccctggacggcagaggcaaggacggacgggagctccactgtgaatcggcggcacgcgccgcaggaggctgggactggtccagtttgtactgtcgatagttttagataaagtatttatcattttttaaaaagtataaacaattctgacttattttattccatctaagtggtaaaaggcaacttattgagaaatataaatatctatatatgagagctctatataaagacacgtgtctgcagggcgggcccgccagcggattcgccacagcctgccccggtgctatctcgtccccaggcccgcgcctgcctccacccgcttggtgctgactagacgctgacaacgccgaaccccgttctcggaaacgccgcccggccggctcccccgacgcgctgctcccgtaccaaaggcaggcccgtcgccaccacattcctcggaggcctccccgcggcctgagccccttcctgagcgccctggcgcctgccctgagctcttcacctttaccccggcactgtgaacccccagactgttcaccctccggggcgtgggttgcgcccttgcatgtgaaggggcctgcgcggtgacgcagctggccatgtgctgcgcgatggtgctgtgaggacggcgcgggcacgttgaacaagtgcatttacttttgtatttctcggctgtccatggctcgcagcatgccctgcgatgcggggcaggcctgtcgtgggtcccttggtgtttctgtacaggagagagtcacactaatgagtggcagtattttatagagatgtgatgagaatttataaatttcatagatttgacagcttttatttttagatggtataatgcacagtgaagaggaaagaaaagcgaggggaaaaaaccttatttattcaaacagtgcacaaaatggccccagcgtcagccccgaccctagacccctcagttgcagctcccagcagcccagacagagctgccggcgcccctgcctgccccacatcccttcctgtcagggccacgcctggcacccatcccttggagcctgtgctggttctcccagctgctgtgggtgtgctggggccagggtgcactgctgaaacctggcctctctggccctaggccccagggtgacgtcggccccccactctgcagccttggcgggtgcctgggactgggtgtggaaggagaggagctgaggccggggtgtagcaggcaggcagggccactccagtgcttctggagccctgagcagtcagggcctgggttgtctgagcagtggtggctctgtgccctccctggaggatgggatctgggagtctgagctccccgcatctggccctgggctgtgtggcacttgctgagcccaccttctcaagtgcttgctcctgtgagatggcatcggggagccccttccccaaggtgccacagatccaccctccagggagctgccagccctgtgttctggttcccaagggcaggatggacacacgtcacatccctaccacgtggcctccaaagggagccacggaggaaaggcttctgtggttgctaggtgggggagtcctgtgtgggagggcctgaagacccctgcttgtgcctggtgaggggggtgctgcctcccccagcccccaacaacctctcagacccccaccctccaacatagctgagttctgaagatggtgctccggacctgtcctcttaagtggtgcccagtgccctccccaccccacgttggtgctctcagctagaaggtgctgtgcctctgcctgagccccaagccccgagcctggccttcaggacaggcagcctgctctgtgtcgccacgggccggatacgccacagggttgatggcagagacggccgagtccctggtctagaacaagacacattctttaaacactgtattacttctgcctccctctaggtgacagtggcagtccgggtgccatcacgggtcctgcagatggccatgcagggctcctgcccacgcaggccaccgtatgttcaggacacgcactgggtctcagagccactggcccaggcagaagtctccttgagcccactgggtcatatgcgtgtcaccacacgtgaactagtgtggtggctgcctgcggacaccctcctgttctgagccctgggcctgtgttcttctcagacactcccagactgaggggtggtgtgtggcgggtggcagggtggctgtggagactggggatctggagcctggtgctggcacctggcctgagtttccgtgggcagctggcggggacctgtgctgctgctgctgactgtgggtgggcgggcggcgcctgggagtggctcttgctcaggaattgataggaaccctaaaaactaggataccccctcctcggcccatgaggcacgcacagtgacttatttaagacttcccccttaatttatctgcccccaggatgcgtcagtctgttcagtggtcagcaggccccccaccccccgccgactgccctcgccatcgtggtcagacccccctcccaacacaacacgctgctggtctgtgtcagcctttgtaacgtgggaggctctgccgtgtcttccgggtgaactgtatttggattgcgcgcattgtcacggtccgcccctgggctgcaggcgccccttcctctgggcacccctgcattctgcatccccacctctagacgctgtaataaacagactgttttcactcggacctggtgtgaatggcagcctttcttccaggtggcatgaggcgtctcctggcggccagtgagaggccccggctagtgtgtcatcgccgaaacggggagtggagggcctaggggtgctcctagcagaagctccgggggctgacaccaggacaccctggccttggggaggcttatgagggcaccaggccacaggcaaggggaggcttatgagggcaccaggccacaggcaaagtgccttttgatgaacggaaaaccagatctgcgaccccaatgacatcggcaaagtccttttcacatcagatggaccaaagcccgcccaggccccagccacactccgggagggcccgtgaatgccagaggcaggaccccaggtcaccacaggattcctgataccacacagcagctctgttctccccaggcctgggtcccagcctccacctgtcctggctgggggttctagctctcccctcagtgcaggaggcccagccactgcctctcaggaccctgagccttacttcccttgggtgggggctccctggctgcccctcccctctccttcacttcaccgccatccagtgtggaaaagaggtacctttatttgaacagaacaagcaccctggccccagggcaaccacttccccaggtgcacagccagggccctcctgtctgcaggagaattcacagctggtgtgggactcagcccctaggccattcacagctttgtctggctctgtacattcattcagcacggggcaggggggccatgccaccagcctgggggctcaccaggcccctggatgcacacaactcaggcagggcacctgtgggaaggcgcatatcctggcggcagcagcacgtggcaccaggtgccaggccagttaggtggatcctggggccccagggagcgcagcttgctgggcagtttcataaaatgcagcccctgcccacacccacctggcttcaggctttggatgtctccaaaccaaaaacctcccactgaaaatccaggtgtgatggccgggtgtggcggctcatgcctgtgatccccgctacttgggaagctgaggcaggaggatcacttgagtccagaaggtcaaggtcacagtgagctgtggcaccactgcactctagcctgggcaacacagtgaaaccctgacccaaaaaccaaaaaccaaaacaaaacagatccaggcatggccaagcgattcatggctgggcagggccagtcccgtcccgctgcacgctgaccaccgtgccctgcgctcacgcctgcaagccactcagctggaacctggcctcctcggatatgccgaactgttccagggggtcctgtggggaggacgggtggccatgagccagggctggaggactgcctctgccacctgcagccccaccccggccctctgcagccctgcacacaccttgcccgtcaccttccggatttcgttcctgtagaagatgaggcttctccgcatgaactcgtagctggggaaaagggtggcacggggtcaaatgcccgctctgcatggctgctgtgcccaccccagcagtgcccaccaccgcctggccccacctggcccgacgcagagcctccatccactcctgacactgctcctcgctgctgcactcaaagtgatacttcctctcagggtcctcaatgaagcctggggatggaacacctgtggtcggtcctacccacagccacaagcagcttcctcttgccattgcccataaactgtcccttctctggcccccacaaagatgtgttcatgtcctgaccccccagaacccatgagtatggccctgtatataaacagggtctttgcatataaactagtcaaaatgaggttgtcgccaggtgcggtggctcatgcctataatcccagcgctttgagaggccaaggtgggaggattgcttgagctcaggagttcgagaccagcctgggtgacatggcaaaatccccatctctacaaaaacaaaaattagccaggtgtggtggtggggccttgtaggcccagccactccggagtcagaagtgggaggactgcttgagccaagggggttgaggctgcagtgagctgtgatcacgccactgcactccagcctcggaaacaaaagatcctgtctcaaaaataaagagggccgggtacggtggctcaagaccgtaatcccagcactttgggaggccgaggtgggaggatcacctgaggtcaggagttcgagagcagcctggccaatatggcgaaaccccgtctctactaaaaatacaaaaattagctgggcatggtggcgcgtgcctgtagtaccagctactcgggaggctgaggcaggagaatcacttgaacccgagagggggaagttacagggagccgagattgcaccactgcactccagcctgggcgacataccaagaccctgtctcaaaaaataagcaaataaaataataaagtgaagtaaaaaggggttgtcagggtgggccctaaattctgcttggcgtctgtgtagaaggggaaatgtgggcacagacgtgatgcaaggaggacaaggtgacgcttccacaagccaaggaacctggaggatactggccaccactaggaactgggagattcccctcggcctcagaaggattcggccccacccacaccttcatctaggatttctggcctccagaactgtagagaatgtttctgatatttaagccacctggcctgtggaattttgacagccactctgggcaaactagcagggactccatctttccccgcagaagggaatctcttaagacccaggagaacacccccctctcactcctcctacccccacctgggatttccagcccggggccatataacaatgctagacccatgctactcttggcagctggggaaacgctttgggtggggctggcccacctgccctgtaagtacagcctgggcccacagggaacaaagagcagagtctgggagggacccaagcttaagtggactcggcaggtgggaagggtggtgcccgccaggagaacttgaccttgagctgcccgtggacaatgcactcttgtgtttgaggagggtggcgccaggctggggacacagaggagaccttgggcgcccggggaggggaaagtgcggcgctgcgggtgccccgggctgcgggaagcgccgctggcttccctagccccactcactgatggagaaggtgccgggctcttcccggacgactctgcagcgctccagcagcagggctccgacgggctggaggagacacgggcgccgggacggggcagtgagcacccggcctccgaggggcccagcctgggacccgcccgcgcgcccgggacgcccctacctcggcctcgtctgtccgaaagtagaagaggaaattcaccaccagcttcaccagccgccgcttcagcactgcgggcacagcgcgcactcaggggcgcaggcagcccccgcccggaccccggcctcccgtccccggcgccccgacccggactccggcctccggcacccccgcccagaccccggccccggcctcccgcccctggcactgtctcggtctcccgggtcccgctcaccgctgcccttcttggggcccctcatgcccagctcggccgccatctcggccggctgccgggacagagcctgcagctccttctcgttgtaccgcatggctccgcggggaacgggaacccgggccgcgccctcccggccgccgtccccgctcaggctggggccggcgccaaaaatgtctcagggcgcagacacggaagcacccccagggctagtgcgcctgcgcaccttgggccagccatgccgcccgcctccgctgcgtggcgctggcgacccgtggctgctggcgtgggcggggtaccggttggtaggagagacggaccgttgttacataaccattaaactgaaataaaccggaccaaggtggaacagaatcaaggcaccccagcgatggctggcacccctttctagagcggccaggcgcaggcggagggagcgataacgtcgcccggagagtgtcagccgctccctcgcgaaagttggccccgtgcggccgcagcggaccgagggttcgttgagagcgttgtgcgcacgcgcagtttgccttccaggccgcgctttcagcctctccccctccagccttttccttcgcgcctcgggaccctctgactcacgccgctgggcgggccaggcatgcgcacaccagagggcccgtctcatttgccccggaagtgctttctttgcccgccgttcgccaaacgaagtcgtggaggtggcgaaacgaggaggagataacgcggccttgggctctggtgaggagtagaggcggttgagggcggcggccgacgcggaccgggggttccctgggggacagcggacgtaggagagaggcgcttgcgacaggccgcgggccgagggtggggcggcggcgtcgctcccctccctcctcccgtgagcgtccggccttgtgcatcctgaggccccgcgctgggcgggcctggagggtcgggcccgccaggaactctatttccaaactcctgttgggaggccgcgcgcggggcctcacgcctgtaatctcactgctcagggaggccttggcgggaggatcgcttgaggccaggagttcgagaccagcctggacaacacaccgagacccccatctctacaaaaaattttaaaaaattagccaggagtggtggttgtacctgtaggcccagctactcgagaggatcgcttgagctcggaatgtcgaggctgcagtgagccatgatcccaccactgcactccagcctgggcaacatagcgagaccccatcactgcaaaaaaaaaaaaaaaaaaaattagccgggcgtggttggtgacgcgcgcctgtagtcccagctactctggaggctgaagcgggaagatcgcttgagtccaggaggtcgaggctgcagtgagttgtgattgtgccgttgcactccagcctggacaacagagcaagaccctgtttgacaaaataaaaaagaaacaaccaagattcgttggggtcgaatcgggatcgcggctgaaatggtttcggccgccttccttgtagccgagaacgcttctgtatgctcatctatacctgttagttgactggggctctgtgatgtaattcctgtgagcctcagttcccttaaaatgggagtgacggcttcaacatcatgccaaaggcgaccagaacacgttagctggccccattttgcaggtgcaccccgctgtgaccgttgttcttgtgtatccttggacgacaccaaacagccaggcggagctctggaaaataggttgttggctaggttaaggagagaacggtgttgccacgaaaaactaattccttctcaatggtctagtcccaggtcccagaggccacttttcctcaattcttaagctcatttcccctggtcgtcatcggttttttgtttgttttgagacagggtcttgctctgtcacccaggctggagtgagtgcagtggtgcaatcacagcttactccagcctcaaactcccatgctcaagccatcctcctgcctcaacctctcgagtagctgggatcacaggtgctcaccaccatgtccggcgaatttttgtattttttgtagagacgaggtttcgccatgttgcccaggctggtctcgaactcctgaccaggtgatccacctgccacggcctcccaaagtggtaggattacaggcatgagccactgcacccggctaatttttgtattttttgtagagatggggttttaccaggttggccaggctgtcccctgatctttaccttagtaagtaacagatttcttcatggatttatcaatttgtagacatcatctgctgatttcttgtcacggctgttgagatcttctccctcccatccacccactgcaccttcaccttccatatcctgaatgagtttatgtcatgagcatagttggtcattggttgtgttttctaaataagatgcaaaatattgttggctgctaaaacaagtaatatgttcagctaggcttttcttgtaccattctatcttcccttaaagctaattaactttgtttttaccatgagcctgattttcttttacctgctgtttgttttttccccacaaagctcccacctctcacacacctatcagttgtattttgcataggtttaaataaattgatctcccctcaccacttccctccaagacccccttatcctcctcctccaaatgggactggttgtgctctgacctggaagtggagctgttgtcccaaaccttcctgtccttgctcccctgtgctgacctctgtttccagtgtggtcatctctttcccttcatgctgtccgagcaaaacttctgggagcttttgaagaaacagatgatttttttcggggggtgggggaagtccttgattgtctgaaaacgagtttatttaccctcatagttagaagtttggtggggtataaaaatctagattgaaaatctgtatttgtaggccgggcgtggtggctcacgcctgtaatcccagcactttgggaggctgaggcgggcggatgacctgagtttgggagtttgagaccagcctcgccaacctggcgaaatcccatctccactaaaaatataaaaatttgccaggcgttttggcatgtgcctgtaatctcagctactcgggaggctaaggcaggagaatggcttgaacctgggaggtggaggttgcagtgagccaagatcgagctactgcctgggcgacagagcgagaatccgtctcaaaaaaaaaaaaaaaaaaagagagagaaaaaaatctgtatttgctcagaactgtgaaagcattgttttcagtgctgttctcaaaagatcagttcctatgctggtttctgatgttttctgctcagttgtctttctgtctagtagaagcttaacatcttccttggtgtcgtaaaatttcctgatttcctcatttaccggggatctttttatttgctgatcctggtgggtgcttggtatctggacagtttggttcctttagtcctgggttttgtttttgtttttaattttcttgctaatgttcttatgttatttctgtgataatatttttcctgttttattttgttgggtgttttttcagttctcactctggaatgtcctctaggttcttgcttttcctcctgtttttttaacttttgactttcctttatgaaagatttgtttggctcagcttccaactctggtatggaattttttgtttggatcgtcctgtctgtatttttcaagggctttttgttttaattcagcttgtcattcagcttcctgttctgggtttgtggtgcagtggcttcccccgataatgaaggagggtgtcagcgatctcttactgggatacccatcagtctctttgttctcggatgcgtgtgtttctctttaagaacaaagcggccggcagctctgtgtgagcgccacttctcatccagggaggtcaactgcccagtggcctggcaaggagcgggccttttctttgaggtgtggggaccctgaatgtcagtatttgagaactcttcctctggcgctgtttccccggaaaagactcctggcctcccccggggtggggggcgtccgtgctgggccgcctgccacctgagctgtgcggaggaaccgccagacttcccgctgcccaggcggcaggtcgtgattcagtccccccttttcagcctgaccctggacccccttgctctgctgggcctgtctctctaactctagaggcccttttataccagttcttctgggaataaagttctgatctcctcgagggttgtgggcgatccgagcgtgggaccttccccggggtgccgccccatttcagctgctgaggagggacagtgtgggtgttcggtggctgcgatggcttgggttcggatggtttctggttttcggatcagagctttacttggtgagtggttgagtattggtctgggtttaggtttcagtgggccagactccacaggtgctccctgtgacagctggagcttgtgtcctgagccagccactggccgctggggcgttctgtctggccagttttaagaagtaacttggcttgccctagatggatttgaactcttggctttgttagcattttgccatctaagttccttctccaagtcctcccagccatcgtgtcattagaacgttctggaaatgtcactaaaatgtgcccggaaataagtgcatcaagatagattggtggctcttggtgtggccatctgcacctgtcctggccccagaagctgtgctgcctcttccgcatggaggagcaaagcgcaggtcgctcctgaggctgagctccgctcctcctgggccctgggtcctccgcagacacgtcccacccactgctcttctctctgccagaagctgccggccatgaggacgcatgggtgggcgctgtggagagtgcaggcttgggggtagagaccagtgatggctctgcagagcttagcctcagagtaggggcgtggtccaggagaggccacgacagggacaagcagggcgttcgcatgctgttgaattccttcatgacgaaaggagcaggtcgtcctcccgggagaggggagcgcttgatgacgccccgagatctgtgtgtgggagtgcctctcagcaccaggcccctcctgggttcttggagtgcatccgtgaaagaaggccgattccctgccttctcacacgttcccccgagcgagggcttggttcggtgctgagatgcgtggaggactgtggtttctgtgatgtgtggagaggcaagtgcggctgcggcctggtgggaggctgcttgctgggctccccacgcacgtcccctgatgtgagtttcatgtcacttgaccaggaaatgcttgaatgtcctccagagaaaaatgaggcacttcatgaacctgtccgggcggcacccacacaatcctgcccgcctgtgggccgtccggagacagaacctcccaggcagctgtaagctgttgtggcagcagggactgtaggagttggcgtggcctgcagctgacggcgccagcatggagagggtgcagttctccctggtcctgaagaatgtgtggccaagaagcccgaggcggggagggttccttggggccagagggtggcgttcccagcaaaggacagtccttctggtgtcacagtctcctttttcacactggaatgttctttgttttgtgaagggatggcgatggtcacagtggtggtttctcgaagtttacgtgacaacatgtaaaaatgggcatctctaggtgggcttttgtgacatctgaacttctgatggggcagccgtgatactgcagtgagctgggaggtccacctcaccagttaccatgcttgatcattttcataaacttgcccagggaataaaaactggttggggagggctcctgggcccccatagagtaaggggtgacttcaggccccaccacaagtcagcagtacagctggcctgtccctcagcatgcccctgcacacctgcggccactgtggcctgtccctcagcgtgcccctgcacacctgccgccactgtggcctgtccctcagcgtgcccctgcacacctgcggccactgtgccctgtccctcagcgtgcccctgcacacctgcagacactgtgacacatcactgcagacgcagtagttcagatgacacggctgtatcagcttctggttctggggtcagagtccaaacagtccacagggctccattccttctggaggctctgggggacaactcgtttcctgcctttcccagtgtccagaggcacctgtgtgccttgcctcggggccccttcctccccattcacagccacagcgcagcctctctgactctcagcctcccgcctcctctcatgaggtcacccaggatcacctgccattttaagatcctcaagcccacctgcacatcccttttctgccatgaggggacatgttcacaggtcccagggattaggatgtggacatcttttgggggcagtgattcactcagtctcatgggccccatctctctgagctcacccaagacccttaaaccagggcccggggccaacattgagcaggcaagggaaagactaccaggagatgagaggaggctgcctggaactcagatttgcacagagcctgaaagggcgtgggagaccttggcagaggcctgcatcaggaagaggatgttggggactcagcagagccccctgcgccacaagcagatgtggcagatctcccaggtgttactcagtgaggatgcgaagatcagtgtcctcactgatctccgcctaacaaatttacatcgagcccaagagattaggttgggacaagtaagcgtagccaaccagagagggaattcagaggaaggcgtgaacactaggggcttgggcagtccgggatggcttcctggaggtggtgactcgtttgtgagatcttggtcttgtcttccctttatgccttctctgggctccctattacaatttcaggtctccaggccttggcaccctgggctggagcggcttcctctccatccctcatgcctggtcacttggagacaggctccagcttccttgtgtctgtgcctgtccacagtgggcctcagcctcctggaagagactgggtgcgctatggggtggccccctcagggctggttagaccctggcgctgggagtgcagggtgaggggcagtctcgagggctccagcccagcccgcccagggaggtcccagcagcagccccgagttctgagccatcttcctcactctcctcttggcctccacaggtgtctcccagtctgctaaagccctaaggccatcaccatggacttccagcatcgccccgggggcaagaccgggagcgggggcgtggcctcctcctccgagagcaaccgtgaccgcagggagcgcctccggcagctggccctggagaccatcgacatcaacaaggtgggccagccaccgtgcagctgcctgtggtgggtgctgggctttccagggcagccctggagagggtgccagaggctcttcttgggcctccgcccaggctgggcgatgcagccccgtgtccagacgctcccctgttgcccccgagcagccacagctcccatctgtccaccccagagagcagaccctctgtggctctgagtcccatgtggacatgttttgttctgtccacagccttctgttttgcattatttaattttctgggagtggggagagctgatgtcagtccagccagatgtggtgaagggcagcctttgattttagcttgtgcagaggcaggggtgagccgagtcccctcagcaccgtggacatcggggctggagcactctttgtgtaccctgacatgccccacgggcctggcctatggcaagggctctgttaccgtccccgtcttccagatgaggtcatgggtagagggggtgccacagccgcagatggtggagttagactttgaactccagcgtctgagacgagatgtgtgcgcccggctgccccagcttagggcctgcagatgggcgggtctttgggtcttcagtgtagcccatttgcttttcttgtgcctgtgtctgccttgtgcctactgctggcgtggtggcgtgggcagtggacggctccctgcctcgggagtgaccggcggtgctgtcctggctgtgcctccctctgactcagaaccaccaggaaggtggtgtcgggggctccctgggaacccccactgctcgaagcctggcccacagccccaggtggtgacacccgtgctcacgaaggcctcccgctggatcccccgttttcagaaatgcttgaccactgtcagcggtagccatgcctctacagaaggggggttctgcctccatgcctctacagaaaggggatcccgcctctgagggccttgacggcagcaggccgcgatcttctgtctaacgggcccctgttcttcccctccaggacccgtacttcatgaagaaccacctgggctcctatgaatgcaaactctgcctgacacttcacaacaatgaggtgcggcctctgcctggctccgggcggctcgcggcgggctgagtggctgacgtcagggggacctgcctgtgtctgtccgcccggcctcgagtcatgcgtgtttcctttccactccaggggagctacctggcacatacgcaggggaagaagcaccagaccaacctgtgagtacctcatgtccctttgatgcctggtgctccagcagccgttggctcaagtctctgtgagcctcgcgggccactgctccacagccggggagccagcctggcctgagcctccctgggcgcttgagtacggttcctggggagcattagagaacagaggcatggatggctgaggcgggcagatcacttgaggtcaggagttcgagaccagcctggccaacattgtgaaactccatctctactaaaaatacaaaaattaggccaggcatggtggcacacgtctgtaatcacagctactatggaggctgaggcaggagaatcttgaatctgggaggcagagattgcagtgaaccaaggtgctgccactgtactccatcctgggcgacagagtgagactcttgtcttattaaaaaaaaaaaaaaagagcagaggcatggagttgttggaagggccccagccagggacagtgaggagcatgacaggaagagaacatgcctgtcctatccctgtcctcagccaaaccccagggcccctcccaggcccctggccctcctcatctctcagcttgtagtgagctccaaggtcagggggctcctggcacctgggcccatggctttggtgcctgtgtgtggaggggtcccagcagcacctccatcctgtccgcagggcccggcgagcagccaaggaggccaaggaggcccctgcccagcccgcgcctgagaaggtcaaggtggaggtgaagaagtttgtgaagatcggccgcccgggctacaaaggtgagtctgcccgcagcggggccggccacagccgctgccgtgacataagtgtgttctttagtctccagtgcgggaggtgcagccctgatagcctcctccctgagccactgttttccggccttggtggccgtccctcacccacctgcagcctctggcgttgtgtctgggagctgtcaggctgggcccgataagcacccatctcacccagcagcccatttcccagctgagccacagtctgtgccctcctgtccgggtcttgtggaagcttctgggaattcttgccaagcaaaagagtggaagtggaggtgtggtgagccctggcacatccctccggttaaccttgaagcctttgaaggaggacagggagaagcggctgttagaggcagctcctcccggaccctcagcagtgggaatggctagaggtgaccccggttcagaaagctggggaagtgaccagggtggaagatagagacttgtgtccatagggttcaggaaggcgggcacgctacccagcaagtgttctttacagaaggcggggacagcctgtgtgcctggcctccagacagaagcctgcagggcagaggtcccggggcaggtgcaccgggtgggcgagggtggctagagcggcaggctcctggtggggaggccctgacaggtcctgggcttgggctcaggacggtgaggcggcagagggcttgtgagtgtgcgtgtctgaggccgcatggagagtggccgggcggcaggcagcccagcagccattctcggggtccaggctgctgagctctggcgggaagggcatcctctctcgctcaccgtatacatggtgtcagccctgttcaggcggccccgctcgaatcccagagccagggtgccgagggcccctccctacccagtggccccaactcctgctgggtggtatcccagcacccctggtgaagggctctggggattgggacaaaggagcaccatcctcggtccctgcctgagtgactccgcaggtagctcagctctggcgcacctgtgccttcacctataccagaatcccagagcctgggcggagattgtctaatggttgccagagctgcagggcctcccccggggtcccgctctcgttcagtgggtggcattagcctgccccaggttcctcagcttcggagaggacaagcagccgggacctgagagctttctgtgttgcagtgaccaagcagagagactcggagatgggccagcagagcctcctcttccaggtgagatcagggacttgggcgtggggggcggccaaaggcacccaagaggcggctctgccacccggccgtgtccctgcagattgactaccctgagatcgccgagggcatcatgccacgtcaccgcttcatgtctgcgtacgagcagaggatcgagcctccggaccggcgctggcagtacctgctcatggccgccgagccctacgagaccattgccttcaaggtagcgtggctgcggggttccctgggcccccttgagatgtgcaagccagaaggatctgcataggctgggcaggatgcccctcccatcgggcttggggtcccctgggccccccccaagtcggagccagaagggtctgcacaggccgggcagggcacctctcccattgggctctgcaggagggcctgcttgggctccactgggccaatgagaagggaggccggcagggctgagcgccaggcctgtgaggcctttgccaagtgacctcacttcctgggccaggctgctggagggcttcctacagcctgtccccatgcctggacagggcggccatcaggaaacaaataatacaaacggtgactgcccagggagggggccaacagcgtgctagcattgaggccaggtctgtttcactccagaactgaaccctgtgccccacgaaagtcttaccagccttctcctgggctcccagggtagagtccgggctggggaggctagtgcctcgggctccctgcctgatggtcgccctgaggtcacagggaccaggagccctctctgtcccccgccctcccaggtgccgagcagagagatcgacaaggcggagggcaagttctggacacactggaaccgggagaccaagcaggtgagtggctcgccccgagcctggctccttcccacccagccctggcggccctagccctgccctagccccacccgtgcctgctgaacctttctccgtctctctagttcttcctccagttccactttaagatggagaagcccccggctccacccagcctccctgctggcccccctggggtgaagcggcctccacccccgctgatgaacggtctgccccctcggccaccgctgcctgagtctttgccaccgcccccgccaggaggcctgcctctgccacccatgccccccacagggcctgcgccctcagggcccccgggaccaccccagctacccccgccagctccaggggtccaccccccggccccagtggtgcatccccctgcatctggggtccatcccccagctcctggcgtccaccccccagctcctggcgtccatcccccagcccctggggtccacccaccaacctctggggtccaccccccagctcctggagtccaccctccagcccccggggttcacccaccagcccccggagtccacccaccagcccctggggttcacccaccagccccaggggtccatcctcccccatcagcgggggttcacccccaggccccgggggtgcacccagcagcccccgccgttcaccctcaggccccaggggtgcacccaccagccccagggatgcaccctcaggccccgggggtccacccccaacctcccggggtccatccgtcggctcctggggtccaccctcagcctccgggagttcacccctcaaatcctggggtgcaccccccaactcccatgcccccaatgctgaggcccccacttccctccgaaggcccagggaacatacctccccctcccccaaccaactgagaagctgctccctcccccagcaagcccagcgccaggtgctcttgccttttcccactgagagaaggctgctcttttgtactgccccccgctcattaaacagcctcccccagccctgagtgcactgatgtccgcagcgccgccctactgtgtcagtgtgtgtgggagtgccaggcacagcaccatcccccagtttgggccgactggggagggcctggggcccgccaggagacacctgtgggaggcctgagagatggctgtaccttggagatggcctggtggaggacagaccccaccagccagctaggaggggatctggggtcctgttctggggagggaagagcagactccacgatatccttggggtctccagatagcccaccaggggtggggagggtgagcagggacagggcgcccccactgacttgggaccctcctcctccaggcccacacctcagcacccaggacatctgggccccccgcccccagcgctgtctagtttggttgcctggccgtcactcccagcctggttcccactcctgtgtcttctggggatggccctcaaggacggcatgttgacacatcaggcccagctctatcactggggagggagataggctgccagggacagaaagggctctttgagaaggccactctgcctggagtgggggcgccgggcactgtcccccaaggtcgcggcagaggagataggggtctgtcctgcacaaacaccccaccttccactcggctcacttaaggcaggcagcccagcccctggcagcacccacgatgcgggacctgcctctcaccagcctggccctagtgctgtctgccctgggggctctgctggggactgaggccctcagagcagaggagccagctgtgggcaccagtggcctcatcttccgagaagacttggactggcctccaggcagcccacaagagcctctgtgcctggtggcactgggcggggacagcaatggcagcagctcccccctgcgggtggtgggggctctaagcgcctatgagcaggccttcctgggggccgtgcagagggcccgctggggcccccgagacctggccaccttcggggtctgcaacaccggtgacaggcaggctgccttgccctctctacggcggctgggggcctggctgcgggaccctggggggcagcgcctggtggtcctacacctggaggaaggtatgtggggcccagccccaagcttggcaccgccgtcttccttcaggtgggccgggtcctcctagggaagatcaggggctggcagagcccccaccctgggcagggaggctgtggtcttgttcctaggactgggttgcgggtccgtggcctggaaggtgggcaccacactctgtcctgtccccgaagcccagctcttagacttgcccctgcctcggtgccagggagagagctgctgccttctccccacccctgaagacgacgcagggctcggggccagtggaacccttcttcccacagccccagcctgttctcagggccgctggcctaagatactccctgcggggaaggggcttcatcgggcaccccaacccagagaccccagggcggcagccccacccacagcctcagacgcagcccctgcctgcccctgccgtcaccgctccctggctgcaggaaggcagctaagaggggcacccttgtcccccgcttgaggtcccctgcacagtggccagagcggcagggacagatcccaaagattcccggggggtgtggccttcaatggctcaggcgtcccctgctgtcccggctgcagtgacctgggagccaacaccctcgctgaggttccaggagcccccgcctggaggagctggccccccagagctggcgctgctggtgctgtaccctgggcctggccctgaggtcactgtgacgagggctgggctgccgggtgcccaggtaccagggagttgcatggggcagtgcccgggccgtggcggggggcatggatttgttgcagggtctgcagtactgagaacagcgtagaaccagtggcgatgggaggaaggggaccggtagagcggggctgggtaagcctccatccagccgggctgagccctggtctccgcagagcctctgcccctcccgagacacccgctacctggtgttagcggtggaccgccctgcgggggcctggcgcggctccgggctggccttgaccctgcagccccgcggagagggtaggtccgcgtggagagggacggggagccgggtcgactgcccccgggcccccagcccctgagccagccgcgtgcccacccaccgcagactcccggctgagtaccgcccggctgcaggcactgctgttcggcgacgaccaccgctgcttcacacggatgaccccggccctgctcctgctgccgcggtccgagcccgcgccgctgcctgcgcacggccagctggacaccgtgcccttcccgccgcccaggtgcgcgcaggcaccgggacacggggcaggagcgggcgggggcggcgtggcctcgtggccgctctcaactcctccaattgcgggttccaggccatccgcggaactcgaggagtcgccacccagcgcagaccccttcctggagacgctcacgcgcctggtgcgggcgctgcgggtccccccggcccgggcctccgcgccgcgcctggccctggatccggacgcgctggccggcttcccgcagggcctagtcaacctgtcggaccccgcggcgctggagcgcctactcgacggcgaggagccgctgctgctgctgctgaggcccactgcggccaccaccggggatcctgcgcccctgcacgaccccacgtcggcgccgtgggccacggccctggcgcgccgcgtggctgctgaactgcaagcggcggctgccgagctgcgaagcctcccgggtctgcctccggccacagccccgctgctggcgcgcctgctcgcgctctgcccaggtggccccggcggcctcggcgatcccctgcgagcgctgctgctcctgaaggcgctgcagggcctgcgcgtggagtggcgcgggcgggatccgcgcgggccgggtcgggcacagcgcagcgcgggggccaccgccgccgacgggccgtgcgcgctgcgcgagctcagcgtagacctccgcgccgagcgctccgtactcatccccgagacctaccaggccaacaattgccagggcgtgtgcggctggcctcagtccgaccgcaacccgcgctacggcaaccacgtggtgctgctgctgaagatgcaggtccgtggggccgccctggcgcgcccaccctgctgcgtgcccaccgcctacgcgggcaagctgctcatcagcctgtcggaggagcgcatcagcgcgcaccacgtgcccaacatggtggccaccgagtgtggctgccggtgacccctgcgccgcgcggactcctgccccgagggtccggacgcgccccagctcgcgccccttcccatatttattcggaccccaagcatcgccccaataaagaccagcaagcaaccggctggggtgtccgtgcgtgttagggggcccgtgggacctcccttgccgtctctcctcgcgcacggcccgggtccgccctgtagcgctcgctgtctctcccctgcctgaagcgccccaccaccgtctttcaggccccggacttggtgccgggtccaggcgtaaaggagcaggtgactctgcggccgcagcactcgctttatttcgccagagtcgcggggcgtccagaaggggcccctggactccggcgcggggccggctcagtcccgccccttgcctgcgcggagcttctggcgactcccaggccgctgctcctcgtcgggacgcctcggggacacccaggcctgcttcttcctgggctcggcgtccctggagtcccgtgcccacggccggtggcccccttcgcgtgactcccagcgctggggtagggcttcccggggctccctggcggcccgtggcctctcctctttccgcggcctctctttcttaggtctctcctccttccgcggcttctccttccgcggcttcccctctctccgaggcctctccttgggtccccggtctgcgagggtcacacggtcctcccggacggcctctccggtggcctcgccgggctcctcttcgtcgttctctgcagcctcccgactcccgggaatcttgggtctgacctctgcctcggcccggggcgcaggcggcgctgatggaggcgcctgggcctcgaacttaggctgcaagacagagtggggtcctggggtaagcgcccaccttccccccggcccgggctccttctttccttggggatgaaggtcccaatgcccgcggtcagtggaaggaagctcttaccaggggcgacgatggctccctcggggctgagcttggcgggacccagggctcgggcacacgtgcttggagtgctgcctccccagggacggcgtctgcagcgacagggtcgggacccgagtcagctgggccgaggcacggtccacactgtccatccctccctcacccctagagcccccctccctggacagttggagtggggctcccccggtacggctgagactaaggatgcccccgagccgtgggaagggactccgggactccgctgccgcggcgccccttctccgaacctcgctctttcaattggtcattcttccccccgaccacgggctgtaggaggcccctagcaagggaggggtcgcaggagtgcccccggggggcgctcacgagctgagcggtccccagagagggcgcaggggaaaggcggcagaacgctacgaggcaggaggggttgcacaaggttcatccggaagccagaacctactcgcggcgaggggaatgggccccgcaaaaggtccacaccgggtgagaggggcgcgcaaggcccgtcacttaaggggagatgcacaaaccaactttgggggcgtgcaagacccagccctggagaggaggctcccagaccccaccctggcggcacagcgcctttccttggaggaataggcgcacaggtggaccccagcctcgccccacctctggggagcctgcgctcaccgcggcacagctggaaagccgagcccagcagcgccaccagcgaggcgagcaccaggcacttgttgagcgacaggtctccccagggcagctcctcgctcagggccgggggcggcggcggcggctgcaggggcggcgcggtctgcgccttcttgcgcgcggggacgctccgagggcctgcgggggcaagtgcgcgctgcgctgtggtcactggctctgtgccgcccccttccccgggcgcaggggacaagagacaggcctgtgccctgaacccggctctctctgcctgcctgtgcggccccgggcgcaggtgaacccagccccgggtgccccgcagctgcacggggatgcctagagtttctggaaggtaacttcccggagctgagtggcatagctggtattattacgcattagtagaggctccctgcccgttgactcgctgcctgccacacttcgacgccactcaaccaggacaccaccctccaagatccaaggacccagctccggcacctgagcctcacaccagtccgttcccaccccacacctcacccatgcctcctgcaaacccactcgctccggctttcagcctctccttccccgttcctggggtccccctggcggcaggctctttttccatcttcttgggcctggtgtccacactggggccttcagccacctgagagtcctgtggttatcacgagacattccacatgtttccttccagtgccaaacccttcccgtgggctttagacacctgcctcccttggtcggcttgtccccaactccccaggcgtcctgggttaaaggctgagggtcccagctactcacgtggggcacgctgccggagtcggccagcctgggtgtcgctgtgggaacacaggcagagtcaaggttgtggggacccccaggccaatcccaccctctcccctggccctgctgggtgacgtgcgggtgactaaccccatcttatagataagaaagtaggtggaggccagcacagtggttcacacctggaatccagcattttggggagactgaggtgggaggatcacctgagcccaggagtttgagaccagcctgggcaacatagtgagaccccatctctaaaaaaaaaaaaaaaaaaaaattagcgaggcatggtggcctgcacctgtggccccagctacttgggaggctgaggcaggaggatcacttgagcctgggaggtcaaggctgcagtgacttatgatcatgtcactgtactccagcatggaagacagaatgaggctctgtctcaaaaaataataataaaaatatataaaaatataaagaaagcagacaggcttggagacagctttgcccaaagacacccagcatttcagtggcaacgtgggattcgaacctagatctgtgtggcccagcacctgtcttccttgggggctccttacagacccctgaggcagaaatgagggccaggggttgaacatggggagcacactataagccagtccagtgtgggaggctaagaagctctagtctctgaagatgggcctcctggctcaaggggaccatcagggaagggcttcctcccgccagcgccacaagggtacctgaagccctgtcctcctgggtctcggccagcgcagagtggtcctccagggcctggcagctgcccaggccgccatccagctcctcccaggctctggttgtcatggacatggctggagcagcagcaggtcccaggccaggctgggaggggtggggaacaaggtcttgcatttactgagtctctgccacaggcctgggcctgacctggaggttctgcggacaccaactaacaggccccgtcctcccacccctcctcactcggcaaattcatactcatgccaggcatggcccggcgcccactccaggcatctctctgaccccgcatgcctgccctgggacccctccctaccgcccagcctcactggggtccagtatccatcagtacagtagcccaggctgctctggcccagagagggcgggagcccctgcaggacaacacagcaatgagtcccagacgcaccccaaaccgaaactcttggccccagagtcagctcatgttctctgagaccagggactatttttatctggtgcctgaggccagcgggacaggctaacaggtgccccagcccctcccaggcctctgctctcatggggtctccctctgggccaccctgacttgccattctgggcacccacatcctgctgcgtgaccctgtgagtctacaggctcaggccccagcagcagaaccatcctggctctggtcgtgacaggccggggcaggggaggagggtcccggttgtggttgggggtcttctgatcctgacacagagtaccctgccttgtcccactaactctgttcccataggacagatgaggaaaccgaggctagagacagtgccattggctggaggtcgcaaggagcttcaagtcagacccaaagctgtactcttcagggtccccatggcctctggctgctgggattagggtgtccctgtatctaggctgaaaaaccacccagccctggggctccaagacctggaaggggcctattgcgtggcagtgggggaggggcccaagaagcatgggaggctggtgtgtggcccctgggtgtgcatgggggcagctccaggaattggggacccttacagtcctctgcaacaccccttcacaccccgggagcccacacctctgcccgggattcccccagcctcacttccttacccccgagcctcgcttacccgccagccgctttgctgagccttgtggacaggacggaggatggggagggtggccccgtgatggacggcaacaggtggccagagaccgcgggtgggccaatcagcatgcccgctggagtgaggtcacagccggggagtcccccacccttccctgccattgcagcagggcagggcattgctcctactcagcactcgccactgccacccagggagacgtagcgcctgcagctgggactacaggcgcgcaccatcacacccggtaagttttcaattttttttgagacggagtctcgctctgtctcccaggctggagtgcggtggcgcgatctccactcactgcaagctccgcctcccgggttcacgccattcccgtgcctcagcctcccgagtagctgggactacaggcgcccgccaccgcgcccggctaattttttttgtatttttagtagagatggggtttcaccgtgttagccaggatggtctcggtctcctgacctcggaatccgcccaccttggcctcccaaattgctggaattacaggcgtgagccactgcacccggactaatttttgtatttttttttcagtagagacagggtttccctatgttggccaggctgctctcgaactcctgaccgcaagtaatccatgtgatccgctcgccttggccacccaaagtgctgggatcccaggcgggagcccctgcaatgcattcattcctgctgtttaaagccactgtatttggggtcatttgtttctgtggctctggcaggctcatacactcggaactgcctgctcccacaccgtcatgcagagaaacctgacgcctctgctctggagaggacccggggtctctcagcccccaaaggcacattctaaggcctgcaggcagatgtttgagccctacctgcaaagcatggtgactctgggagtcctgagggaagaggggaagtggattttggtggtgaggcctgtgtgttaaaaatcctgagtgaatggccgggcgcggtggctcacgcctgtaatcccagcactgtgggaggctgaggcgggcggatcgcctgaggtcgggagtttgacaccagcctggccaacatggtgaaatcttgtctctattaaaaatacaaaaattagtgaggcgtgatagtggatgcctgtaatcccagctactggggaggctgaggcaggagaattgcttgaacccgggaggtggaggttgcagtgagccgagatcacatcattgcactccagcctgggcgacagagtgagactctgtctcaaataataataataattctgagtgaatagggcctccccaggaactaccaagagacccagaaggccagcccgccttcagcaaagcaagggctggggttccctggtccccactccctccgctttagaaacggctctcggccgggcgcggtggctcacgcctgtaatcccagcactttgggaggccaaggcaggtggatcacaaggtcaggagattgagaccctcctggctaacacggtgaaaccccgtctctactaaaaatacaaaaaattagctgagtgtcgtggcgggcgcctgtagtcccagctactcgggaggctgaggcaggagaatggcgtgaacccgggaggcagagtttgcagtgagccgagatggcaccactgcactccagcctgggcgacagagcgagactctgtctcaaaaagaaaaaaaaaaagaaatggctctcatttttttctgtatgacacaaggcagagacaaacaggaaacaaagagaagctgaaagcaaaaactgtaaagcacctgtcatcttcccgcccccaaacagacactgtttaatagtttgacatgttctttccgctgtttgtaacttgtgattttattattagttccatatttatttttataaagctggcataattagcgaagggctgaacatcttgtttgtaacctagatttattttttcttcctaaaagtttttttgttgttgttgagatggagtctctctctgtcacccaggctggagtgcaatggcgcgatctcggctcactgcaacctctgcctcctgggttcaagcgattctcctgcctcagcctcccgaggacctaggattacaggcatgcaccactgcgcctggctaattttcatatttttagcagagatggggtttcaccatgttaatcaggctggtctcaaactcctgacctcaggcgatctgcccactctggcctcctgaagtgttgggattacaggcgtgagccacagtgcttggcccctcctaaaagtatattacagcttggcagttcctcaaaaagctaaaatagaatgaccataagatgcagaaactctactcctaggtatctacgaaaaggaatccgaagcttggactcagatatttgcacacccaagttcagggcagcacgattctccgcagccacatggtgtaggcagctctagcgttccatcctcagatacacggatcaacacagcgtggcccttccacacggtgaagtacgacacagccgtgaacaggaacgaggctctgactgcggccatggcgtgaatgcactttaaggatgtcacgctcggtgagaggtgccagacacagaaggccatgctgtatgtgatcccatttctatgaaatgtccaggacagggccgggtacagtggctcatgcctgtaatcccagcactttgggaggccaaggtgggtggatcacgaggtcaggagatcgagaccatcctggctaacacggtgaaaccccgtctctactaaaaatacaaaaaatcagccgggcgtggtggcgggcgcctgtagtcccagctacttgggaggctgaggcaggagaatggcgtgaacccgggaggcggagcttgcagtgagctgagatcacgccactgcactccagcccgggcgacagagcgagactccgtctcaaaaaaaaaaaaaaaaaaaaaaagaaatgtccaggacaggccaattcacagagacaggaaggggatttgtgggtgccggggctgggaaggggatggggagtgatggctgatggggatggagcttcatttagggtgacaagaatgttctggaataagacaggggtggtggttgctgagtcatttcacttaggatgatgatctccagctccatccatgttgctgcaaaatatgatttcatttgtttgttttttgagacaggctctcatctccgtcacccaggctggcatgcgttggcgcaatcagggctcactacagcctcagcctcttcagctcaggtggtcatcccacctcagcctcctgagtagctgggaccacaggtgcctgacaccacacgcagctaattttttattttctatttatgagacagagtctcactctgtggcccaggctccagtgcagtggggccatctctgctcattgcaacctctgcctcccaggctcaagcgattctcctgcctcagtctcctgaggagctgggattacaggcatatgccaccatgcccagctaatttttttttttttttgagatggagtttcgctcttgtcacccagactggagtgcagtggcacaatctcggctctctgcaacctctgcctcccgggttcaagtgattctcctgccccagcctcccaagtagctgcgattacaggtgcctgccaccacatccagctaatttttgtatttttagtagtgacagcgttttgccatgtcgaccaggctggtctcaaactcctgacctcaggtgatccacctgcctcggcctcccaaagtgctgagattacaggcgtgagccactgcgcccagctgctaatttttgcatttttagtagagatggtgtttcaccatgttgcccaggctggtctcgaactcctgggctcaagtgatccaccggccctggcctcctgaaatgctgggattacaggtgtgagccaccacgccctgtctctatgcttaactttttgaagagccaccagtctctcttccaaagcgactgaactgttttacctgcccagcagccatacaggagcgttccaacttctccacgtccaactcgtcattttccagtttctttgtttgtgtttttattgccagcctagtgggtgtgaacggcatgatctcattgtggtttcgatttgcatttctctggtcaaaataaatagctttttttttttttaagagaccaggtctccctatgttagcgagggtagtctgaaacccttggcctcaagcaatcctcctgccttggcctcccaaagtgctgggatcacaggcgtgagccaccgcgcccagcctcaacagcattttcaccttcttattctcatagtgtctccctttgcattcctttcctggaaggctcagctttcccagaagcaaagcctggacacggggcctctgtgggactttctttttttatcttttttttttttgagacggagtccagccctgttgcccaggctggagtgcaatggcgcaatctcggctcactacaacctctgcctcctgggtacaagcaattctcctgcctcagcctcccaagtagctgggattacaggtgcgcaccaccatgcccagctaattttttgtatctttagtagagatggggtttcaccatgttggccagggtgatcttgaactcctgacctagtgatccacctgccccggcctcccaaagtgctggggttacaagtgtgagccactgagcccggcctggacttttttttttttttaagactgagtctgcccaggctggagtgcagtggcacaatctcggctcactgcaacctctgcctcccaggttcaagtgattctcctgccccagcctcccaagtagctgggattacaggtgcatgccaccacacccagctaatttgtgtatttttagtactgacagggttttgccatgtcatccaggctggtcttgaattcctgacctcaggtgatcctcctgcctcggcctcccaaagtgctgggattacaggcatgagccaccacacccggcctatttttgctaattttgtgaagaacagtgtcagctgagggcactgactctggatggagacgactcagattctgaccctgactccactgctgcctggctgtgccacagtttcttttcctgtaaaatggaaataaaatggagaccccacctcctggggtccttgtgagcattaagccaagcacggggacaggtgcttggctcctgtacacagcttgagctgtgtactcatattgttatcgctgccatgacaaaggtgcggaagccactgaggctgtgagattccgcaccccgtggaagcccaatggtgacaccccccacagcagggtccttccagcctctggaacacaaaacacctgagtgggaaacccccaggggaccctcagcatgggccactgaggcaggaggttgagaactgtggggagtgctgggcagtggccaacttcctgcctctgccagggcagcacaccagtttcatttgtgtccaccctacttgttctcagggagaggtggctcctttcctggggtgacttctaggctggggcatttaattgctagtgtgagatcttccagggtcttcctctcttggccatagtgacgttcaagatggcaggggaggtgagcagcgccccctagggcctgagaagctcatggagcaagaacaagaaatagacctttcctggtttgcaggtgtgtttacaatttttttgttttgtatttatttatttattttaaaaattttattcatctatttatttttgaatgggggtcttgctatattgcccaggcaggtcttgaactcctggactcaagctatcctcctgactctgcctctctaagagctggcattataggtgtgagccaccatgcctggcccgttttgttttgttttttaaagagatagggctgggcacagtggctcacacctgggaggccgaggcaagtggatcacttgaggctcggagttcaagagcagcctgggcaacgtagcaagaccctgtctgtacaagaaaaagaaaaaaaaagaaaagaaaaacaataaaaaacaattttacgactgggcgtggtggctcacgccagtaatctcagcactttgggaggccgaggcgggtggatcacgaggtcaggagttcaaaaccagcctggccaagatggtgaaaccccatctctactaaaaatacaaaagaaattagccaggcgtggtggcaggtacctgtaatcccagttacttgggaggctgaggcagagaagtgcttgaacccgggaggcagaggttgcagtgagccaagattgcgctactgcactccagcctgggtgactccgtctcaaaaaaaaaaaatttacaaaagtaaaggtcaaactccatgaaaatagagacatggacaatgtggggcaggaaatactgaagagccgcagagaatgaggttcagatgctctgcgcataaagctttcttcctttttctataacaaacctttgtgaatgcattaggccaggcacggtggctcacacatgtaatcccagcactttgggaggctgagccacgaggatcacctgagcccaggagtttgagaccagcctgggcaacatggtgaaaacccatctctacaaaaatacaataaaataaacatgacaaatactgcaaaataaaatcctgaaaattatagcaaggggcaaaaccataagaaatataggctgggcgcggtggctcacccctgtaatcccagaattttgggaggccgaggcgggcggatcacctgaggttgggagttccagaccaccctggacaacatggtgaaaccccatctctactaaaaatacaaaaattagccagccgtgtggtgcacgcctgtaatcccagctactgaggaggctgagacacgataatcccttggacctggcaggtggaggttgcagtaaactgagatggcgcctctgcactccagcctgggggacagagtgaaactccatctcaaaaaaaaaaaaagaggccgggcgcggtggctcacgcctgtaatcccagcactttgggaggccgaggcgggcggatcacgaggtcaggagattgagaccatcctggctaacacagtgtaaccccgtctctactaaaaatacaaaaaattagccgtgcatggtggcgggtgcctgtagtcccagctactcaggaggtggaggcagtagaatggcgtgaacctaggaggcagagcttgcagtgagctgagatcgtgacactgcactccagcctgggcgacagagggagactctgtctgaaagaaaaaaaaaagaaatataagtacggtaaagggaaaaacaacaacttgctcgagataagccctgtttacttgggggcctcgcttttccatgtgtgtttgcccagctcatcctgaggctgcccacacggctgtgggtcctgctttatcacccagcagcagatgcctctgcggctttgtggccaaaccctggccctgcacagcctccttgtggcctgagcttattgcaggctgcacggtgcacattacaaatggtcagttggaggccaggcgcggtggctcacgcctgtaatcccagcactttgggaggccgaggcgggtggatcatggggtcaagagatcgagaccatcttggctaacatggtgaaaccccgtctctactaaaaatacaaaaaattagccgggtgtggtgggggtcacctgtagtcccagctacttgggaggctgaggcaggagaatggtgtgaacccgggaggcggaggttgcagtgagccgagattgtgccactgcactccagcctgggcgacagggcaagactccgtctcaaaaaaaaaaaaaaaaaaagttggttcagcctggcgcggtggctcacgcctgtaatcccagcactttgggagcccgaggcgggcagaccacgagatcaagagatcgagatcatcctggccaacatggtgaaactccgtctctactaaaaatacaaaaattagccaggcgtggtggcctgtgcctgtaatcccagctacttgagaggccgaggcaggagaatcgcttgaacctgggaggtggaggttgcagtgagccgagatcacgccactgcactccagtctgggtgacagagcaagactccgtctcaaaaaaaatggtcggttccccaggaggcggaggttgcagtgagtggccactgcactctagcctgtgcgacatgtcaaaaaaaaaaaaaaaaaaaggccggttcttgtttacttccctttttcttccccacactgtttgctcaaaagagttcaagcgccttctgagtttttcttcaggagacagagccaggcttgaatataatgccaggcaggaacacatggagaaaaggaggcccagattctgccttattttcctgatttttcttttttttttttttttttgagatggagcctctctctgtcacccaggctggagtgcagtgacgcgatctcggctcactgcaagcttcgcctcctgggttcacaccattctcctgcctcagcctcccgagtagctgggactacaggcacccaccaccgcacccggctaatttttgctgtatttttagtagagacggggtttcaccgtgttagccaggatggtctcgatctcctgacctcgtgatccgcctgccttggcctctcaaagtgctgggattacaggcgtgagccaccacgcttggccattttcctgcttgctttcatttttttttgagacagtgtcttgctctgtcccccaggctggagtgcagtggtgtgatcacagctcactgcagccttgacctcctgggctcaagtgatcctcttggttcagcctcccaagtagctgggatcacagatgcccacccaatcccagctaattaaaatttttttaattttttaaaatttctagaagtttttaaaattctcaacaaagtgagaacctagagatagggtcttgctatgttggccaggctggtctgcaactcctgggctcaagcgatcttcttgcttcagcctcccaaagtgctgggattacaggcgtgagccactgtgcgcggccccaatccttctttatttttacctgtttacattttattttatttaactcattattataattcttttagagacaaggtctccctctgtcacccaggctgcagtgcagttgagagaccatagttcactgcagccttgaccttcctggctcaggggatcctcctgcctcagccgctggagtagctggaactacaggtgtgcaccaccatgtccctaatttttaaatttgctgcagagatggggtctggctatgtagccctggctggtcttgaactcctgagctcaagcgatcctcttgcctctgcctcccaaagtgcacaccgggcccacataccctcttttaaatcagagtcagccgggtgcggtggctcacgcctgtaatcccagcactttggaagggtgagatgggtggatcacctgagttcaggagttcgagaccagcctgaccaatatggtgaaatcccgtctctactaaaaataccaaaattaactgggcctggtggcgtgagcctgtaattcccaactacttgggaggccgaggcaggagaatcacttgaacctgggaaggggaggttgcagtgagccgccgagatcatgaccctgaactccagcctggtgacaaagtgagactctgtctcaaaaaccaaacagccaggtgcggtggcacacctgtaatcccagcactttgggaggcacgtagatcatgaagtcaggagtttgagaccgtcctggccaatatggtgaaaccctgtctccactaaacacaaaaattagccgggaatggtggtgcacgcctgtagtcccagcttctcgggaggctgaggcaggagaatcgcttgaaccctgtaggtggaggttgcagtgagccaaggttacgccactgcactccagcctgggctacaggtgagactctgtctcaaaaaaaaaaaaaaaaaatcagtccatcaatcaatcaatcagagtcatactctctgcgtcctctgccagcagccgtatcccctcaaccttgatttcagaagaaaacccaggcatgggccctctatccttgaccaccccacatcctctgctgtccctttcagacagttcaagcctcaccacctccagagaaagatatgcctctttctctccctgctgtccgggaggcccctcaccagtcacagactccccagctcccagcaaagcacctcccaccctggggagtttctggggaacccggccaggtgggccagcagggcgcagttgctgatcctagcgctcatcccacgtggcctggccagtgtgggggtggcccttctagaagcctcacagcattggcaggcggccatcagaggcaggcaggaggaggaagtgagagctgctgcagtcaggatggagggatggggctccctggtcgtggctgttctggaaatcgcaccggtgacctgttcatttcgagcaggctcttgcctctgttcccagaggaggtcctcaacttaggggcgtcattctgcccccaagggacattggatgatgtttgggacatttctggttgtcatgacttggagtgctcctggcatggagtgggtggaggccagggacgctgctcagtaccctgcagtgcccaggacgctgcagtccagcctggcaacagagcgagactccgtctcaaaaaacaaaaaaacaaaaaaaaaagcaatccacaccctgagtggggaaggagagaggagaagcatcccaggagctggggccctcctggttcataccatttgcccaggatgccccaccccagagaacaatccaagcccaatgtccacgggtccgagggaggagaccctgagttaattatttgaaacagagtctgttctctgctcacaccagacaccagaataaactccttttttttgagatggagtctcgctctgtagcccaggctggagtgtagtggtgcaatcttggctcactgcaacctccacctcccgggtgccagttcaagcaattctcctgcctcagccccctgagtagctgggattacaggcacgcgccaccatgcccagctaatttttgtatttttagtagagacggggtttcaccatgttggccagactggtcttgcactcctgacctcgtgatccacccgcctcggcctcccaaagtgctgggattacaggcgtgagccaccgtgcccagcctcaggataaactcctaatggggcaaacggtataaaccaggaggcccccagctcctgggatgcttctcctctctccttccccactcagggtgtggattgctttttttttgttttttttgtgacagagtctcgctctgtcaccaggctggagtgcagcggcgccatctcagctcactgcaacctctgcctcaaggtgtggatttcaacgtgcgcagtctcctgggacctcagcagggcagaggatcatgggatgcagagtctcttgggggggtccgtggaatcccctaactcgggagtctcacccagggtgattctgcccccgccaagggacactgggtgatgtctgcggatacttgtggttgtcacaactgggggtgctcaaggcatggagtgggtggaggccagggacgctgctcagcgccctgcagtgcccagggcggccccaaatgtcaaccgcaggagttaatttctgcctcaacacctgaatagcgaatgctcgtagcagagatgcaacaacagccttctggtgcagtacgaaatctcgaaagacaggcaggcgcggtggctcacgcctgttaatccccaaactttgggaggtcgaggcaggcggatcacctgaggtcaggagttccagaccagccttgccaacatggtgaaaccccatctctactaaaaatacaaaaattagccgggcgtggtggcgggcacctgtaatcccagctcctcaggaggctgaagcaggagaatcgcttgaacctgggaggcggaggttgcagcgagccgagattgcgccactgcactccagcctgggtgacagccaggcccggtcgcaaacaaaacaaaattaaaaccatgaaaggaatcaggatttgccaggagtagcatttttgcttggtaagaacaaaattttgtttatacatgaaataaaaaatattttattaaacctcactgcaaagtggcaactttttgctaaattcataatttagtctacacacaagctatgtacccgtatgtgactgccaagagttatatctttgcttattaaaagcaaagtgcagttcatacctgagattttttttctggatttaaccaggaggggaaatatttttgctaggtaagtccacattttacctcacaggcgaaacagtttaccgaacttgaccaccaaagaaatcgttttttccttgggagatccacattttagttcatacatgagatgtgtttctgaattttaactgccaggagtagtgtttttccttagggtaagtttcagtttccacaggaaaaatctgaatttatctgcaaggagtaaaatttttgcttaagtccaaattgtacacgaaatattttactaaatttgaatatctttaacattggaagttctttttttttaaacactggaagcattttaagaactgcaagaccaaatttaaaaaaataaaaccagtaatatcatcgatgattaccaggtgttactggaaataattctggcgcggttggacaaccccccaagcacccgggggcctacccaggggaggggtcccgctgcgtgaagggaccctagggagggcgacgtggaccacgacagacaaacgggcactcgaagacccccgaaaatcggccccagcgagccgcccccgcccccaaggcacgattgtgggggcggggacggctcggggcgcgcgcagcgcgtacccggcgccacggcagccccgcccccagaaggacgcgcgcaggagggggcgtggcccgaggctcaccaaccaatctccagagagcctcttcctttccctttccctttcaccaatcaggcgctgggaggggcgggcgcgactttttttcccggcggccccgcggctctgcccctcgtgcggtcgcgttcccggcggcgcggggggcgtggcctgggcgcagcatctataaaggcgggcggcggcagaggcgccattttgcgaacggcgagcagcggcggcggcgcggagagacgcagcggaggttttcctggtttcggaccccagcggccggatggtgaaatcctccctgcagcggatcctcaatagccactgcttcgccagagagaaggaaggggataaacccagcgccaccatccacgccagccgcaccatgccgctcctaagcctgcacagccgcggcggcagcagcagtgagaggtaagtgccccgcccccgtccgaagcttccagaagcgccggccgcgcaggcctgcggggggccgtcctcggggcgccagataggtccccggcgcgcgagatccgcccctttgtcaaggccagaatcgcgccggggacgaggtaggcgcagggcgggcctggaggtcccccccggccttagcagtgctctcgggggagtcgggtttggggggcaagggtgcggagttggatttggggggcaccgtccggggcgcctgatttgcgggaggggcatgggtcggaggtcggatttgggcgcaggacggggagtcgggggaggcgtgtgtcttttgcggggttcgcgggatgggactcggcttcggaggaggggagaggcttctggtcgagggttggatttgcggggcgcagactgggaattcggtttggaggaagggtgtgcggtcgggtcggatttgggaggcgcaggatggggcaatctggttgggggcggggtcggccttggggggctggtccgcggacaggcagggcccgcggggctggtgaatctgcacttttcggtcccggccgtcgagcgtgcgctgcgggagcggggagcgctttgcggtggacgagctcccgcgggtccctgttgcctcgatgtggcccctgcacgcgacggacctcgtgggccccgtttttcgcccctgagcgagtcggtctggatggcccgggacgcgccgggcgaggccgcgcacgtagacggcacccagggcttctccgcgggggccgccggggagctgggggtggcgcactccgacagcccggcagcgccctgggaagacccccgccgcttcccgggaagacgcgtcccgcttccgggggcgcgggtgccagctgcggttgtgggggagcccgcggggtctcggtcgagctttcccgactgcgtcccccgaggtgggcgtcgctcagccccggatcgggaggttgggccgcggtgctggcggtgccgcggtttgggggccgtgcaaaatggaggcaactttggggcctgtttaccctgcgcagcaaatggctgctggcgctgccggctgcgcgattgtgaaaatctcccccggggcgcgaggccgcgtctgcctggatgacgcaaccgggagggcccgggcctggagcgggggcgggggggcgggcggccgggagccggagcggggcgcgtcctccatgaggtcaggctaggcccgcccggtcttcgcggggacaagcaagagtcccagattttggccgtagtgcagggtggaaaggggaagccgcgacagaactgaaaaggggaagcgctggctgtcttggtggccggggggtgaggctctgccccggcggggctgcgtgaggggaaggggccccccgccctgggaaggttgggctgtcctgggcggcgccgcccgaggagtcggggctcagtgactgctgcccttgtaggtgcttggggcaggcgttggagctgccttcgggaagcctcgggggtgtgggaccgggtgggcccctgcctgggcggggcggggtcttttggccgaggcaggggtggggatgtgctgaaggccgcccggacgccctggaggggtctccgcccggagcctggcgctgcctcgtgacctgcatcatcttcagttccagggtctccctccactgctgtagtaacccgggtccggggcctcggtggtgctcctgatgcccctcacccacccctgaagatcccaggtgggcgagggaatagtcagagggatcacaatctttcagctaacttattctactccgtgagtatggggccgggcctgctggggctgctctggggccacaggtactttcttgtgcaccttgctgcccgtacctgtgattgaatgtaatcgtgggaaccctgagtttcatcagagccggcgcacagtctcctgcagcccaggcgttgcctgagctcaacacggcctaggcccaagctttagcgctgccgggttcttggagtcctgtggggtgagtcagggttctgaattgggctgcaccccctggacaggatgatcggctgaatgtaacagaggaactaacgtccaacgacaagacgaggattctcaacgtccagtccaggctcacagacgccaaacgcattaactggcgaacagtgctgagtggcggcagcctctacatcgagatcccgggcggcgcgctgcccgaggggagcaaggacaggtgaggggcaaggacaggcagggagtgctcacccaggggagcagggaccaggtgaggggcaaggacaggcggggagtgctcacccaggggagcagggaccaggtgcgggttgctgcccaaggggtgcagggacagatgagggagggcactgccttcaggcagcacatatgggggccaccatcgctttgttggtggggacagggtccccccttttttttttttttgagatggagtcttgcttttgttgcccaggctggagtgcagtggcatgatcttggctcactgcaacctctgccttccgggttcaagcgattctcctgcctcagcctcccgagtagctgggcttacaggcgcccgccaccgatgcccagctaatttttgtgtttttagtagagacgaggtttcgctatgttggccaggctggtcttgaactcctgacctcgtgatccgcccacctcggcctcccaaagtgctgggattacaggcgtgagctaccgctcccggcctggggtccctttttaaaaagtgcactccaaattcgtaccctgggattctaccctccaagggatgccaggcagtgtcagagcttttctgtcatggggcatgcacgtgggtgggtgcagcggtgctgctcaacactgtggtgtcaggacggccccacccagaggacgatctgggccccagggggaccctggagtagagcgggcctcagggtagctgctaaggcccaggaggtaggcaggtgggtcgggccagccgagacgctgacactcgctgcagctttgcagttctcctggagttcgctgaggagcagctgcgagccgaccatgtcttcatttgcttccacaagaaccgcgaggacagaggtaggtgacccgtatcgcctgcagtagggtgcgtgggggtgcctgcgccgccccttcattctcagcccgcaggcacggtctccctgcgggggtggggggtgcgggcggggggttctggtcggcaggggttctgacggcttctcccccgcagccgccttgctccgaaccttcagctttttgggctttgagattgtgagaccggggcatccccttgtccccaagagacccgacgcttgcttcatggcctacacgttcgagagagagtcttcgggagaggaggaggagtagggccgcctcggggctgggcatccggcccctggggccaccccttgtcagccgggtgggtaggaaccgtagactcgctcatctcgcctgggtttgtccgcatgttgtaatcgtgcaaataaacgctcactccgaattagcggtgtatttcttgaagtttaatattgtgtttgtgatactgaagtatttgctttaattctaaataaaaatttatattttacttttttattgctggtttaagatgattcagattatccttgtactttgaggagaagtttcttatttggagtcttttggaaacagtcttagtcttttaacttggaaagatgaggtattaatcccctccattgctctccaaaagccaataaagtgattacacccgatgcacctggctctgtggtggtgacgctggggactggtgggaggagtgcctgggaccacagagggccctgggtggaggggtcgcgggggatttggcacccaggcagctgcgggacccctcccacggaggagaccccctgggctgggaggccgggccctcagcttggcgccagccttgccactgctcgcttgaagccccttcctgcctcgcgtccccttccgccccagcctgggcctgcgcatggggatgtctgtgctcccaactcaacttttgagttcgccgtgttactggccgcccctagggacctgcagcgccgttcggggcagcagcacttccggcggggtcgtggcctggagcgcttccgggtctgcaaccccgccgtctgcccggccgcagcgccacctgccggccgcatccgggagcgccacccggaaaatcagggccaggcctggccgggaaaccggctggaaagaggaggaaaggaggaactcgaaaagattgtagacttggcgagcgggccggggggatattcagccgtctgagcggtggtggggtcggccgggaggacaaacctggacacagatacccccagctcatttgggcagcgcaaatgcagagaaggggcattagagctgaggccatgcaggatgaataggagtatgaagcagagtagagggggctgttttctggtgtaaaaaacaacttgggcaaaggcgtggaggctggaaagtaacctccagggatgaacgacatggggttggagactctgaggagactttggaagagccctgtatgtattctgaggcactggggagccatgggaggtgtttgagctggagagggacctcatatctggggttggaaagatcctcccaggactgccatggggaatggaatggaggggcaactctgagtctccaggaaggaagccacaggcaagggcagtgcagtgtgtcagaggcataaaggaagactccatccccctccagtgagtctcctctgtgcctgtttattacatcatcctgtggtattaagtgagcacctactgtgtgccaagcctggcctttgcccccagggaactcacagccttgtggacagtaacagaggaataaatgctcctgagagtgggcggagaacgcagggtaaggagctagcgatggcccagagtgggcacctttatttgtttagagaaagtgaaactgtagccgggcgcggtggctcacgcctgtaatcccagcactttgggaggccgaggcggacggatcacgaggtcaggagatggagaccatcctggctaacacggagaaaccccgtctctactaaaaatacaaaaaattagccgggcgtggtggcgggcgcctgtagtcccagctactcgggaggctgaggcaggagaatggcgtgaacccgggaggcggagcttgcagtaagccgagatcgtctcaaaaaaaaaaaaaaaaaaaaaagaaaaagaaagtggaactggaacagtatggcagagggaacagcctacacaaatgcttgggggcgcgaaagaagttggtgtgtcacggaggaacagggagggaggcagggtgggcgcagagggattgaggggaggtggcagggaaccgcggggactgttttagggaaggtgagtccagaccccgctgagatgagctgggtgtctaaggtcccagggagccttcccttcccgtgacaccaccaagcaattctccaccagggacaggggcattcacatgcccaaaatcactggccatcttcagcacaagggggtgctccagagccaggaatgcctctggtcccggcattggcctctcatggagacaatgacagaacccacgcggaagagcgccctggctgctggggaaggcagaacacagagagacattgatcagcggggttgtccacacctggaagtggcgtgggggccctggcttcagagagctgctgcccaacacaggaggcgctggccagcccccagccctggaggggcagctgcattcctgggaagcccttgacccacatccccagcacgggaggggaggctctggagtggggcattgctctctctgctgcgctcctggactctgcaggaagagggtgtcttggctatcatggagacgctgacctcagccccagccctgcctcctgggcaggcctggaccaggtgtgttcgccctgggttggggtcagtcccacagcagcgccagggcctggcccatcgaggactcggtggcctcggccaggtattcgcaacacagccagtcctcgaggctgggagcttccccacctgcggcccgctctgctaggcgcaggaccagcagcccgcggcgcacccgcagccagggcccgagcgctcggagccagggaccaagcggtgctccgcggccgcgcagctcaggcccgggcccccagagcagcgcctgcagcgcgccccgcgtccgggacgccgagggccgcaagcgggtcagctgtgctgccaggagctccaggcccgcggccaaaggcgtggtcgagggcgcagcaaggctgagcagcgctcggaggaggctgcccagctgcggcgcgtgggggcccggggatcccgggggtccagggggctgcagacagacgcggccaaagtcagtgaggagcaggcgtgggggccccgtcgtcgcacagccccgaggtgccaccagcagcaagttctccggccgcaactcgactagggccgcgccccacgcctccaggaacttcagggccgcgctcagctgcagcagcagcagggccacagcccacacgaactcctccggcggctgcgtgcaggcctccgccagccactgcgccaccgtgcgctctggaacctcggctgccagcgccactgcgcctctccagggcgccccgggcagtgtgccttcaggcaccaggccacacagcccctgcagattgaagtgtggagacagggaggcctgcagctccaggccccacgggtggggcacgtccgccccgggcttgggcacctgcaaggcagagggggtgtcggggcctggatcactgggccccccacaagcaccgcctgccccagtgctacctgccccgaagcctcccacgcacacccccaaactgcccccactacggctaggggctgcctgcatccctccagcagcaggaggtcagtgttaatttggaagttagtcaccagtaaggactttcaggaaagttaagccagggaagaagatgttcctgggcaatgagttcgaaagcagattcctgggccgggcgcggtggctcacgccttcccagcactttgggaggcagggggatcgctgaggtcaggagttcgagaccagcctggccaacgcagggaacgctcgtctctactaaaaaatgcaaaactagctgggcgtggtggcgcgcctgtcatcccagctacttcggaggctgaggtgagagaatcgcttgagcccgggaggtggaggttgcagtgagccgagaacgcgccactgcactccagcctgggcaacagagtgagactctgtctcaaaaacaaaaaacaaaacaaaaaacacaaaagcagatccccggccagagaggtgtgggaggggttttgacaagagctccaaggccatacccatggccccatactttagaaacatggtttcctgggttaactgcgttgattcacgtgttagttgcaaaataaacaagtctaatatggtctggatctgtgtccccaccaaatctcattccccagtgttggaggtggggtctggtgggaggcgacttggatcttgggggtggtttatcatgaatggctcagcaccatctcccttggcactgtcgttgggataacgagtgagttctcgtgagatctggctgtgtaaaggtgagtagcacctcctccctcccttcctcctgctcccaccgtgtgagatgcctgctcccgcctcgccttccactatgattggaagcttcctgaggcctccccagaagcagaagccaccagaaccatgagccaattaaggcccttttctctataaattacccagtctccagtattcctttttcttttcttttcttttttcttctcttttgtttttcttttttgagacagagtctcactctgtcgcccaggctggagtgcaatagcccaattttcgaatctcagctcactgcaacctccgcctcccaggttcaagtgattctcctgccttagcctccaagtagctgggacttcaggtgcgcaccaccgcgcccggctaatttttgtatttttagtagagatgggggtttcactatgttggccaggctggtctcgaactcctgacctcatgatctgcccgccttggccttccaaagtgctgagattacaggcgtcagccactgtgctgcccagcctttttttttttttttagacggagtctcgctctgtcgcccaggctggagcgcagtggtgcgttctcggctcaccgcaagctctgccccctgggttcatgccattctcctgcttcagcctcccaaatagctgggactacaggtgcccaccaccacgcccggctaattttttgtctttttagtagaaacagggtttcaccgtgttagccaggatggtctgtatctcctgacctcgtgatctgcccgcctcggcctcccaaagtgctgggattacaggtgtgagccactgtgcccggcctttttcttttttttttttttgagacggagtctcactctgttgcccaggctggagtgcaatggcccaatcttggcttactgcaacctctgcctcccgggttcaagcaattctcctgcctcagtctcccaagtagctgggtttacaggcgcccgccaccacacctaatttttgtatttttagtagaggctgggtttcaccatgttggccaggctggtcttgaactcctgacctcagctgatccgcccgccttggcctcccaaagtgctgggatgacaggcgtgagccaccgcgcccggctccagtatttctttacagcagtgtgagaactgactcacagaaaggccaaatgaaacaagccctgggttatgtctaagatggggcactggggacacctcagagagggtggggctgtggggctcaccttggcgaccaggatgtgccaggcgtcctcgtgcgcgcgcaccacgcggtaatacagggcgtccccgctctctgcgcagggtgagctgtctaggaggcggaagctgtggccggggtggcagggcccggggtggccccccatgagccgggcacggagccgggcatagatggtacggaggccctgcagctgccgcgcagccagtgcagtgtgcacagcctccgggctgtgcagatcgcggagggagaggcccagtggggcgtcagccgggccaaaggtcagctctgcagggagacaggctggtcccactgcagcctggctcttgtccacactgtgggaccccagaaagggtctccgaggcggctgtacttggatggagctgggatggagggtcctgcgggtgggcagtgactgggtccgggttaggatcttcttgggcaggggtgggggcaggggctctgggttggtggagagggacccaggggtccggaggcggcaggccttggagggcagcaggtgggcacggatctgacctgcagggagagacagtgggggagggttgaggacaggcggagtgggaacgggacacgtgactccacctctcagcctcggtttccccatctctaacatggaagtaatgaggctgggcgccggtggctcatgcttgtaatcccagcacttaggaaggtggaagccgaggcaggaggatcactggaacctagggtttgagaccagcctgggcaacatagtgagaccctgtctctgcaaaaattttttaaaaatttgccggacgcggccatgcacaatggctcatgcctgtaattccagcactttgggaggccgagatgggtggatcacgaggtcaggagatcgagaccatcctggctaacacggtgaaaccccgtctttactaaaaatacaaaaaattagccgggcttggtggtgggcgcctgtggtcccagctactcgggaggctgaggcaggaaaattgtgtgaacttgagaagtggagcttgcagtgaaccgagattgtgccactgcactccagcctgggcggcagagcttacagaaggggaaactgaggcttataggaggatggatcagtttcagagagtgatgccacccagcactcagcgactcccacttacctccgtggctttgcacaagcgtctgtcttgctttttttcttttttgaagtcttgctctgtcgcccagcctggagtgcagtggcacgatctcggctcactgcaacctccgcctcctaggttcaagcgattctcctacctcagcctcccaagtagctgggactacaggtgcccgcccgccactatgcccagctaatttttgtatttttagtagagatggggtttcaccatgttagccaggctggtttcaaactcctgacctcaggtgatctgcctgactcggcctcccaaagtgctgggattacaggcttgaaccattgcacctggcctttttttttttttttttttttttttttgagatggagtctccctctgtcgcccaggctggagtgcggtggctcagtcttggctcactgcaccctctgcctcacaggttcaagcgattctcctgcctcagcctcccgagtagctggaattacaggcatgcaccaccatgtctggctaatttttgtatttttagcagagacaggttttgccatgttggccaggctggtcttgaactcctggcctcaagtgatcctcctccttggcctcccaaagtgctgggattaaagggtgggattacaggcatgagttaccgtgcccagcctctctctctttttaatggtatatatttttttctatttcatggctcactgcagccttgacctcctgggctcaagggatcctcccacctcagcttcccgagcagctgggactgcaggctcttgacaccatgtccatctcattttttttgttttgtagagatggggggcgggtctcattatattgcccaggccggtcttgaactcctggcctcaagggatccacctgcctcagcctcccaaggtgctgggattacaggcgtgagccaccacgccccgcccaccaacccacaggttatttttcagccctggcctactccgggccttcccggaggtcactcattttaccagctgctgctgttcccagaggccatggtgcccggcaacctcctgccgctccctgcacccacctgccgctccctgcacccccctgccgctccctgcacccccgcagcccagggctccctggggagctgcttaccaaggttgctatacgtgggctgagtcgaccaggtggggttgtcgggctcggggggctctgtggggggctccgggctgctcatgttgctggggaaaggtcaaacggggcgtgtgtggggtgaccgtgtgcacgcacagggcgacatggggaggggtccgtgagtgctggggcctgggagaccgtcgaggcctcctgctccagggcccttggtgagaacaggcgcacccacactccactcccttgtccagttttgaccctgctgtgtgatcccgagtgggtttcctgtcctctctgggcccctgctgtgtgatcccgagtgggtttcctgtcctctctgggcccctgctgtgtgatcccgagtgggtttcctactctctctgggcccctgctgtgtgattctgagtgggtttgctgccctctctggggccctgctgtgtgatcctgagtgggtttgctgccctctctgggcccctgatgtgtgatcccgagtgggtttcctgccctctctggggccctgctgtgtgatcccgagtgggtttcctactctctctgggcccctgctgtgtgattctgagtgggtttcctgccctctctggggccctgctgtgtgatcccgagtgggtttcctactctctctgggcccctgctgtgtgattctgagtgggtttgctgccctctctggggccctgctgtgtgatcctgagtgggtttgctgccctctctgggcccctgatgtgtgatcccgagtgggtttcctgccctctctggggccctgctgtgtgatcccgagtgggtttcctgccctctctggggccctgctgtgtgatcccgagtgggtttcctactctctctgggcccctgctgtgtgattctgagtgggtttcctgccctctctggggccctgctgtgtgatcccgagtgggtttcctgccctctctgggcccacttcctcaatcatgaggcaggtctgtcacccatcaattttccaggcagtgggaaggacccccctctgcacgtttgggatggggacagagtgttcagcctgaggacaggcctttgggggtcagttgcgggggagacagtgtccagggacccagggatccacactcaggcctcatccccgagggctcagccgtgcggttgctgccggcagccaggcctcgacccacccccgcccagatcccaacctcaaaaagtggccgcttctgtccagctccccgctccaggagccccctaccttcaagactggcgtgccctctgggggaggaggggtccgtggggacaaactcccaatggccacagcccctggcctcgcaggaggggtctgacctggcgccggcagctgacaggaaaacgtccggcccactgtcagaccgcagcccggggtggggaggggacatttctgcaacacttccccagcagccgaggccgccgcctcccctgcccgcccgcagaggacaggatgtaaccgggagggaacagcctggacagagaccaggaggtgggatctgaaagtcaatagccccagggctgacagccgggtgggggcagtggaaggccccccacagcctcagaggccaggctggggtgcggggcagtggggagccctgtgagatggggagagaggggcagagctggcccaccgtaggggagcgcacagaacacggtggcggctgtccctggagaaggtgcaagtggggtctgtgggtttcacttccccgggaaccacctcccctcctgcggcagcatctgaggagcccccagcggccccctgccccatcccagggcccccgaatgtggagcgtgggcgaggaccctcccggctctgccgcgcctcgctgtgtgactgcgggcaaatccccaccctctccgtgctccggcgaagaaagaagagtggctcccacatcccgcctgctaacagccacgcctgctggatttttctttgaaaagatggaatcggctcgttttcccccttcccccttcctcactgcctcgatgcatttatttagaaaagacgttttagataaaatcaccataaatggaaaaatcaagaatggaaaaaacccaaggaaaagcagacgcggggtgaaattccagctgaactgcgtgcctgtcaaaactgtctttttctttggagacagggtctcacactgttgcccaggctggagcgcagtggtgcaatcccagctcactgcagcctggaacgagctcctggggcgatcctccctcctcggcctcccaaagtgctaggatcacaggtgtgagccaccctgcccggccccaaagatgtttttgctgcaaggattgagtgtattttatgtgggatccccgatcccgtttcccttagggaaaatgggcccagaaagagtaggggctccatccagggtcacgcagcagctcgaggctgggagcagaggtccacagagccactgctgagtccccctggcctcccccaatcccctgagaaggggcaggaggggaaggagactacatttttcttatgaacttcccttgagtgggtcccatgccacacttttttttctttgaggcagggtctagctccgtcccctaggctggagtgccgtggtgtgatcatagctcactgcagcctccgcctcctgggctcaagtgattctcccacctcagcctcctgagtagctgggaccactggtgtgcaccaccatgcctggttaatttttattttatttatttatttttgagatggagtctcactctgttgtccaggctgcagtgcagtggcgcaatcttggctgactgcaacctccgcctcccgggttcaagcaattctcctgcctcaggctcccaagtagctggtactacaggcgtgcaccaccacacctggctaatttttgtattattattattatttttagtagagttggggtttcaccgtgttggccagcctggtctcgaactcctgacctcaggtgacctgcccgcctcagcctcccaaaatgctgggattacaggcgtgagccactgcgcccgccacagagtttaaaatgatgcaaaggctgggcacatgcctgtaatcccagcactttgagaggctgaggtgggtggatcacttgagcccaggagtttggtaccatcctgggcaacacagtgagaccccatctctacaaaaaataaaacatgagcctggcacagtggcgtgtgcctgtggtcccagctactcagaaggctgaggtgggggcattgcttgagtccaggaggtcgaggctgcagggagctatgatcataacactgaactccagcctgggcaacagagtgagaccctatcacaaaaataaatcaataataaataataaaacaatgcaaaaacagacaaacatgcacctcagtaatcaagataaacatcattttactgaatgtttcacaaaacctaaccggcaaactatgggccgagcctctgtttttgtcaataaagttttattggaacccgggtggaggagcagggtaaggcaaagagaagcagggttaaacaagtgcagatcagatcctgtctttatttaaaatattgataggccaggtgtggtggctcatgcctgtaatcccagccctttgggaggctgaggctggtggatcacctgaggtcaggagtttgagaccagcctggccaacatgctgaaaccccatctctactaaaaatacaaaaaaaaaaaaaaaattattcgggcatggaggtgggtgcctgtgatcccagctactctggaggctgaggcaggagaatcgcttgaacccgggaggcggaggttgcagtgagatgagattgcaccactgcactccagcctgggtgacagagcaagactccgtttaaaaaaaaaaaaaaaaaggctgggcgtagtggctcatgcctgtaatcccagcactttgggaggctgaggcaggcagatcacctgaggtcgggagatcgagaccatcctagccaagatggtgaaaccccgtctctactaaaaacacaaaattagccaggcatggtagcctgcacctgtaatcccagttactcgggaggctgaggcaggagaatcgcttgaacccgggaggcagaggttgcagtgagctgagatcgtgcactccagcctgggtgaaactctgtcttcaaaaaaaaaaaaaatgttggtagcgtggtgtggcctctggatcaggcccctccagatcctacagctgtcctttcatttgagaagcccttattgagccatgggagctggggccacattttctctggatccccagcatcacccagtacggggcagggcagggatgccgtatgctgatggatttttacatgacatcggccttttggagaaaaatgcctgtgttttgtttgtttgagacagggtctcactctgtagccaggctggagttcagtggtgcgatctcggctcactgtaaccttcccctccccggttcaagcgattctcctgcctcagccccctgagtagctgggattacaggtggccgccaccacgcccagcaaatttttgtattttcgaaaagatggggtttcgccatgttggcgaggctggtctcgaactcctgaccacaggtgatccacccgcctcggcctcccaaagtgctgggattacagacgtgagccaccatgcccagcctattgcaggactattagcttccaaattacagacaaacaaaccgaggcacagagaggggcagtgacttgccccaggccacacagcaatggaagccggagacctgagcctccagcttcccttggctccacaagcaaaagctcacatgtgggaattgtgcctctgtcttgtggaggaaaacaggaggaagttcatacgcagggctcaggaatcacctggaaaagatgccggcttgtcgggggatgtgggagagagagagacaccccaaacgcgtgtccctgtccagaagatgggggtgagagatccacgagggtgccggcatgggctggggcaccccgagtgctgtcctagctccgtctgggaggggaagtcaagtcaggcttggtcagaagccacccagacatggggcgtgaggatggcttggtctggtcctggttttaggggtcccctcttaggtttccagccaccaaggagatgggtgttactttagctgggtcttggctgcctgagcagggagggcctctcagctggggtctcccctgccctcccccgagtgcaccccataaatgagtcagggttcatggaaaccttggaggttgcacctggttcatgtcaggcactcagagcattgcacagggaagaggcggctctcctggacggggactctgaggcctacaggacaatagtttcacctgcctttgctgtaggagagaacgggaaatcagtccccacgggagagtcccacagcttagagcccccctcaccctccagctgccttgaaaccaggcatggagagagggccgcctcacagtccctgacaggcctctgttctgcccccgaagggcagggaaataaaggaaccttagtcccaggttcaaatgggggaaccgaggcccagagagtgacactgggctgtggcgagtgggagactgctcttggccgggtcttctgcatcctagttccgtccacttccatcctgaaaaagcacaagcttctccctgtgccttcccgggcgggtggggtttgagacttcatgcccactgtgcctcagtttccccacctgtcaccgctccgtgcctcggtttctccatctgttgccgctctgtgcctcaatttccccatctgtcagtgaggactggggtggggctaaagcactttattagtctcacttccaaagccaagactccctggcttttctcggagccctcagagacaggcagggcagacatgggaccctgtcagcagcacccagactccccgacagaccaattccaggaggcacagtggggacccatgtcttctttcttccccggcctgagtttggggcaggagtttcccaatggcccagctttgcccactcttctcagcccccacctgtccccagctggggtctcagagcggcttccctccaccctctgccccttgctcgacccatctgtaaaatgggttcgttagcaggacccacccagctcacagggctggcctcagcgtgaaaggagggaacacacacagcgcctggaacagcgccgggaacagcatgggcgctgcagaagtgtggcctatcacatgtcactagtggcgtggaattccctcagggttggcttcccctggggaccccagcagcccctcatccctcagccctgccccctgttgctcccatgggagtaagaacaaaatctgaagtttgttattaaatcggttccatttttattggatttgaaccaaatacagcaggatgaggggtgggggtgctgaggggtcttagttcatgttgggatggggtggggggctcagggggctgggaaatcctaatatacggatgctctgtgaaccctaacctggccgagaatgcaccccctcctgtctttgataggctaaaggcacttggatatcaattctggggggcccttggggttgtcatggtaagcagagtcagacaggtgctaagaaaaaaattggttctgcccaattcaggggtggcggttggggttgcacgaacttcagccctcactcatgtcgagccccctgggccatctgtacatcgtggtgctggcctgggccctcccggccacagctcagggagaacgggctgttgtctccttccagctccttctgaaacttttgctcaaagccttcagggctgagccagctttctctctgtttctctctggctgatcgatctcagagcagtcttcagggatccaggatccaagtcaagccatcaagctcatctgcaggcctggcctctgaatacagggtaataggtttgaccctcagacccattttacagatgaggacactgatggtctaggtggtcttcagtcaccagctgagatcacatagccgggcaggagcagagctgcttttgagcccttcccgcaaagtcctggagggtctgtcctaacctcttggttggcagccaagcccctttctggctgaggttttggcccaacagtggttcctgtccctgcccccagcaatgtcctaactgtcctctggaggatgtggaggggaggggcaagaactggctgtgaggaggccaggtcacagatggtccctgtggtcccggtctggtgcctgaatccttctgcaaaacctcagctcctgcttgtttgccccccgtgacaggatgcccaccatctgcagagcaaccgggcggtgacctcagggaagctcttccttgaccagagctgcagtcggcctgtgaccccagctttggtcctggatctgccccacctctgcaggtgcagagacccagcttcctccatcaccttctcccgaggacccgggtccaggcctccctgcagggtgaagcccttgttccggccttgttcttgtcactacactgcaccgcacgtagccgggatccccgggaaccccctgtgctctttggtctcgttccccacctgagccacgggtcagcagggccggccatgatggggccacgctcagggcttgtctgaggccggctcagaggtcatgtgtacctaggggcaaaagtccctccagtagacccatttggaaggacactcagcaccccagaagccatggttctgggccggggcagggtggccacctctcccttgtggggtggccctctcttgcctgctgttctgggaagcacgtggcagcggagggaggcggagggctggggtgatggctccttcttgtggacagccctgctgggctgtggggaggacggaggacagggcgtgtggacccctgactgtgaccaccgtgtgtgctgggtcctcagcaagacctgagcccaggccccgaggtcggctgggagatgctcagctgagcaggcgctggggtgggctctgtgtcccaggtgtgagctgtgtctcagttatgcgttgtgcctgtcccaggtgtgaactgagcatgtccctggtgtgagctgtgctctcacgagagccctgcctgcctctgtggtcagctctggtgcccagggcttggttttagtgtcagctgggtgtgagggtgtgtgtctcgggtgtgagctgtgtgtgtcccagatgtgagttctgtgttctgggtgtgagctgtgtgttccagtgtgagctgagtgtgtcctgggtgtgagctgtatcccgggtgtgagctgtgtgttccactgtgagctgtccttgtatcaggtgtgagctgagtgtgtcctgcgtatgagctgtgtgtcccgggtgtgagctctgtgttccgggtgtgagctgtgtgtcccgggtgtgagctgtgtttcccgggtgtaagctgtgtgtcccgggtgtgagctgtgtgttctgggtgtgagctgtgtgtgtcctgggtgtgagctgtgtgtcccgggtgtgagttgcgcctgtcccgggtgtgagctttgctctcacgagagccctgcctgccccctgcggtcagctctggtgccccgggtctggttttagtgtcggctgggtgtgaggtgtgttgcacctgtgtgattgggttccaggtgtgagtgtgtctctgggtgtgaggtgtaggacggccaggtgtgagcaatgcagactttctgcgcaccctccccttggggctgtggggccctttgtgggacccgggtgtccaccgtctccccgatgcgatctgtgtacaaagggctgggggagcggaagcccagggcttgggggcagcagtcttgtgcctcctgggtgtgaattgcgggccctgaggatcctggggtctctgagcgcccccagccaccccgggttggtagacgggagcccatccccccatccttgcagcccgcacccccaccccccagctcagccaccatagcagggacaggaagacgggttgaaatctttagaaaacgcttgagaaactgcaaaaaagacgcatgctgatgaaaaacagtcctgcggttgggcgtctacaaaaaaaggggaagttctgcctggggagcgccgtgcagccgtccccttcccctccgggaaatgcataggtggacacgcgagcggccggcccgcgggggaggggaggggagggtccgccctggggacccctcagatcatcttcatgttgaacttgcgcgcgcctccctggcccgccgcggcggccggcccatccaccttgcggaaggagtactccaccgagaagttgtttttgtgctgcccgcggccgcggctccacacgaacagcagcacgaagcagaagaggaccacgcccaggaaggtgatgcagcccatggcggtggacaccaggatggtggtgaggtcgagcggcgcgcgcagggccgccagcgtctcgttgtgggcctcgcccggggtccggttggcggccggctcggggcgcacggtcagcgtggcgaagtaggtgtcgttgccgcccgcgttgctggccacgcacgtgtaggtgccgctgtcctgcggccgcgcgtcctggatctccagcgtccccccggggagcacgcgcgcccggcccgcgctggtggccgtcaccggccggtgctggggggtcacccaggccacggtgggcgccggctcgccctcggcgcggcagaggaagcggacgtcttcgcccgcggtggccgtgacgcgctgcagccgccgctcccggatcttgggtttgcggcacacgaagtactcgaacagcacggagtccggcaggtttcgcagcgcgtcgccgcgcacctcggccggggtggcgcaggccggcagccgcccgtcgaagttgagggtcttgcgacgctgcacgatccacagcaggcgacagtcgcaggccagcgggttcccgtccacgcgcagcgtctctagcgtgttcaccgagtggaaggtgctctcctccaacgtggagagcaggttgttggagaggttgagcaggcggatctggcgcaggcccaggaaggcctgcggctccaccacagccagcagggccccggccaggtgcagctcgcgcaggcggaccaggtcccggaacgacccccgcggcaccgtgctgatggggttgtgcgacagattgaggcaggtgaggtgcgcctggtgccgcagcgcggcggccggcacggcggtgatgttggtgtgggtgaccgacagcgaggtcaggttcaggccccgcaggctgcccgccgccacctcctccagcagcggccagttgtcaatctccaggtgcagcagcccgggcagcctgcggaagttctggtcctccagggaggcgatggccaggtggcgcagccgcagggcgcccaggctgcgcagatggcccagcgactccccggacagagccgtgaggttgcagcgctccagggtcagctcctccagggccagcagccccgcgaaggcgcggcgcgagacgaataccaggtcgttgtcgcccacttccagccggcgcaggctgtgcaggtcctggaaagtgtagtccagcaggattaccagcttgttctcgctcaggtccagcagcgtgaggttgtccaggcgcgtgaagaccccgggcgggatgagcttcagctggttgccacggagacgcaggacgcgcaggcgcggcaggttggcgaaggcgccgggctccacgtgcgcgatggcgttctcgctcaggtccagctcctccagcgcgggcagcgcggccaggtcgcccgggttcaggcagcggatgcggttgcggctgagctccagcaggcgggtctcggccgggatgccgtcgggcacggcggtcaggcggcggcgcgtgcaggccaccgcgcgggtctgcacggtgcactcgcagcgggccgggcagcctccagccgggggcggcgccgcgggcagcaggagcaggggcaggctcaggacgcacagccagcaggtcatggtgcggagcgtgggcctagggccgcgccaccatcctcctgcgcacctgcgggcgggcggggagcgggcagcgttagcaccgttagcacccctccgcggcgcctctgccgccagcccgcccctaacccgtcccagcacggcggctcgctcctgtaaacccagcattttgggaggctgagatggaagaattgcttgagttcaagagttcgagaccagcctgcacaacatagcaagactcccatctctacaaaaaaataaaagatgagccgcatgtggtggtgtaggcctgtggtcccagctactcaggaggctgaggcaggaggatggcttgggcccaggaggtggaggctgcagtgagatatgcttgtgccactgcactccagcctgggcaacacggtgagacccctgtctcttaaaaaaaaaaaaattaaaaattagctggttttcaagtaattgtgaaatattgaaaagtttacccaggcatggtggcctgcacctgtggtcccagctactcaggaggctgagccaggaggattgcttgagcccagggggttgaggccacagtgagctgtgatcgtgccactgcactccagcctgggagatagagcaaaaaaccctgtctcaaaaaaaaaaaaaaaaaaaaaaaaaagcagcattgatccaccgtgtggctgcaattccaatctcctgggtttttttgttttgttttgtttgtgtttgtttgtctgtttgagatggaggctcactctgtcatccaggctggagtgcagtggcttgatctcggctcactgaaacctccacctcccgggttcaagcaattctcctgcctcagcctcctgagtagctgggattacaggtgcccgccaccacgtccggctaatttttgtatttttagtagagacggggttttaccatattggccaggttggtctcaaactcctgacctcaggtgatccacctgcctccgcctcccaaagtgctgggattacaggtgtgagccaccgcgcccacccgctcctgggtgtctttgcataagagaatggaacacacagcgcacggaaaacctgggaacattcacagccgcatctgtaacagccaaacagtggaaaaggctggaatgtgccccaaggaatggatgggtcagcaccgtgcagccacccacacacgaacacgactcagccatgaaaaggagtgaggctctgacccaggccacggtggggatgcaccttgaggacgccatgctcagtgagagacgcgacacaaaaggccacactgtatgaccccgtttctttctttctttctttttgagacggagtcttgctctgtcacccaggctggagtgcggtggcacaatctcacctcactgcaagctctgcctcccgggttcacgccattctcctgcctcagcctcccgagtaactggggctacaggtgccagccaccacgcctggctaattttttgtgtttttagtagagacgggatttcaccgtgttagccaggatggtctcgatctcctgacctcgtgatccaccctccttggcctcccaaagtgctgggattacaggagtgagccaccgcgcctggcctttttttttttttggagacagagtctcactctggcccaggctggaatgcagtggtgcgatctcagctcactgcaagctccccctccccagggtttaagtgattctcctgcctcagcctcctgagtagctgggactacaggcacccgccaccatgcccagctaatttttgtagttttagtacagatggggttttgccatgttggccaggctggtcttgaactcctgacctcgggtaatccaccggccttggcctcccaaagtgctgggattacaggtgtgagccaccgcgcccgtccgtgtgatctcatttctatgaaatgtccaggacaggcccatccacagacagggagatgacatttgatctcagaccctgttgtaggtggaactgtgttcccgcaaatgttcaaggccgggcgcggtggctcacgcctgtaaatccagcattttgggaggccgaggtgggtggatcacctgaggtcaggagttcgagaccagcctgggcaacatggggaacccccgtctcaactaaaaatacaaaagttagcctggcgtggtggcgcgcatctatagtcctaactaggggaatctggggtgggaggatcgcttgatcccaggagttgaggcttcagtgagctgtgatcgtgccactgcgctctagccactgggcaacagagtgagactgtctcaagggaaaaaaaaaggtatgttcacgtcctgccctccgtgcctgctgtgcacgggacctcatttggaatcagggtctttacagatgtgctcagggctagatgagactgcagtggattacagtgagccttttccaacgactcctgtccttacaacaagagggagacttggacacacacctagccctatacaggggaaatagagccgtgtgaacacggaggcagaggctagggtgacacagccacaagccggggattgctgagagccccaggaagccgggagaggcaggaaggacgcgccccgggagcttccagagggcccccggccctgcggacaccttgattttggacttccgcctccggagctgggaaggcatatatttcggttgttttaaaccccccggggtttgtggcgccgtgttctggcaggaaacaggccgacccaaaagttgaacagagcccatggttttctggaggaagggtgtgtgggctgggggaacagccacggcagaggccccgaggtgtggcgggagtctggtgaagctaaaggagagagtggaggggggcggggagctgggttaggaggggcctctgggtggggggcagatgacatggagccgtggtggcccagaggaacaggcgccaatgctccgtgggtcctggtagctgtgcctcctgggctgtttccgtctctcctgggagcctgctgcacccttaccagctcttcttggctgcagccaagattctgggggctggggtggcgggtggaggtggggttggagggagcgggaggaagcagccagaactaccaggcggcattgcccagcttcttctgcttggccgcctcccccgccagccggccggctatttttggcatcttggcagctgagcccccctcggcatccccccaggccccgtggcccaaaccaggttgtgcgtctcctcacggttcccactggccttcgatcctcatttgctaaatatctgcgaaggcagctcccgcctccccagtgcctacgcgaatttaatcccagagcgaacagacgcggagccccgggagactgcttcatgtcagagatgaattgtacgtaagtgaggacagggtttgtatcttgcagctgtaattcattaagatgaggtcacgcaggagcagggagagccctaattcaatgactggcatccttataagagggaaatctggacacagagacacaggcaacggccaagtcacaacacaggcagagactggagtgattcatccacaagtcaagtgacaccagggatggccagctaccaccggaagctggaagagtcagaaagggtctccccaaaagcccccaaaggaagctggacctgcttgagcttcgacttccagactccagaactgtgagagcagcagctcctcttgcccggcgcggtggctcacgcctgtcatcccagcacttcgggaggctgaggcgggtggatcacttgaggtcaggagttcgagagcagcctaagcaacatggagaaaccctgtctctactaaaaaatacaaaaactagccgggcgtggtgatgggcgcctgtaatcccagctccttgtgaggctgagggaggagaatcgcttgaacctggcaggcggaggtggcagtgagccgagattgtgccactgcactccagcctgggcgacaagaggggaaactccgtctcaataaatacataaataaataaggtgaaacgccaaactgaattctggatttaggtggacaggacacatatgtacagatgccaaaactgggcattcacatgccacgtggaacagcacagagtgtggtggaaaggaaggtgtcgcaggtgagaatgtggtcccaccgagagaaaagcgaggggcccctggttcccaggaggccttggtcctcctgcccccagcttgggaacataggaaactcgagggagggaggaagggagggagcgagagagggggcatgccccccccaaccccggaatcatccttaatcccaacctgggcatgttacagggaaggcaatccttccctcccagcaagctccctcccagcactgtttttctgggtcattctctcccgagctgctgccctgccgacagcacactcaggggctgtgtcacgggaggggacaagagtgctagggcggtgatggcacttttatctgccccccgaccctgcacctccccccttactgtccgctccacagtgtttacaaaaccactggtgaaaacctgcccacagcccaggtgtggcggctcacacctgtaatcccagcccacaggccgggcgcggtggttcacgcctgtcatcccagaactttgggaggccaaggcggggggatcactggagcccaggaggtccaggatgcagtgagctgagatcgcgccgctgcactctagcttgggcaacagagcgagactctgtcttttggttcttttttttttgagttagggtctcactctgtcgcctgggctggaatgcaatggcatgatctcagctcactgcaacctccacctcctgggttcaggtgattatcctgcctcagcctcccaagtagctggggttacaggtgcccactaccacacccggctaatttttgtatttttagtagagacggggtttcaccatgtgggccaggttggtttcgaactccacttcaaatgatccacccacctcggcctctcaaagtgctgggattacaggtgtgagccaccgtgcccagctgcaagaccctgtttttaaaaaagaagaataggccgggcatggtggctcacacctgtaatcccagcactttgggaggccgaggcgggcagatcacaaggtcaggagatcgagaccatcctggctaacatggtgaaaccccgtctctactaaaaaaacatacaaaaaattagccgggcgtggtggcgggcgcccgtagtcccagctactcgggaggctgaggcaggagaatggcgtgaacccgggaggcggagcttgcagtgagctgagatcacgccactgcactccaacctgggcgacagagcgagactccgtctcaaaaaaaaataaaaaagaagaagaataaagtaaacctacccacagctctcaggcgagaaacatccatctgttggcctgcaagaccctacagcaagcagccctcacccccaccctagactcatccagatactgcaaaagctctttcctctcagtgcagacccctcaccctgctctgctcccccaggacccgggcatgcaccctccctcccccccttttttttttttttttctgagacagagtctcgctctgtcgcccaggctggagtgcagtggcatgatctctgttcactgcaacctccgcctcccaggttcacgccattctcctgcttcagcctcccgaggagctgggactacaggtgcccgccaccacgcccggctaatttttgtatttttagtagagacgggatttcaccacgttggccaggatggtctcgatctcctgacctcgtgatccacctgcctcagcttcccaaagtgctgggattacaggcataagccaccgcacccggcctttttttttttttttttttgaaatggagcttcattctttttgtccaggctggagtgcaatggcacgatctcaacttactgcaacctctgcctcccgagtttaagtgattctcctgtctcagcctaccaagtagctgggattacaggcatacgccaccacgcccagctaatttttgtatttttagtagcgatggggtttcaccatgttagccaggctggtctcaaactcctaacctcaagtgatccacccgcctcggcctcccaaagtgctggaattacagtgtgagccaccgcgcctggcctgtttgttttttgagacaaggtcttgctctgtcgcccagtctggaatggcaggatctcctgggaggcctttgccttccagcttcaagcgattctcctgcctcagcctcctgagtagctgggactacaggcgcccgccaccacatccagcttatttttgtatttttagtagagatggggtttcatcatgttagccaggctggtctcaaactcctgggctcaagtgatctgcctgcctcagcctcctaaagtgctgagattataggtgtgagccactgggcctggtccattttctaaattagaggtttctttttaagttggaatttatttatttatttatttatttagagacaggttcttgctctgttgcccaggttggagtgcagtggtgtgatctcggctcactgcagcctccacctccccagctcaagcgatcctcccacctcagcctctcaagtagctgggattataggcaagtgccagcacacctggttaattttttcatttttttgtagagatagggtctcactctattgcccaggctggtctcgaactcctgggctgaagtgatccacctgccttggcctccgaaggtgccgggaacacaggcatgagccaccgtgctgggccaataattttttttttttttttttttttgacatagagtcttgctctgtcatccaggctggagtgcagtggtgtgatctcagctcactgcaacctctgcctcctgggttcaagagattctgctgtctcagcctcccgagtagctgggattacaagcacgcaccaccaggtctggctaatttttgtatttttagtagagatgggatttcaccatgttggtcaggctggtctcgaactcctgacctcgtgatccgcccacctcggcctctcaaagtgctgggattacaggcgtgagccaccgcacccggcccaagaaattttttttaaagcagttcccatagagcacagataagggcaaaatcaggaagtttcctggagagatgacaggtctggaatcgctaggtcacagtcacactgatccagtggcagaagtgcctgcgggaggcctcaattcggatgcgctgtgtgacctctgttgagaaacctaccctctctggacctcgcctgtcacggtataggtacaagagccctccggggcaccctccaagctctggctctataattactcctgggatgagaggacagctgatccctcgcgcccagcaggggccactcaagctgtgacctagttttacaaccctgactcccccactcgacggcctggccctgtcatttcctctgcagggtgctgccggggaggcaggaggggggatctggcagctggactcaggcttctgacatgtcccctaagggtctggtgttccccaacttgggaggaagaactggttcctggagaggggacatgggagactcgattctgtgtacacggcctgcatctgctcaccatgtgccctgaatgcatccggttgtcctccctggtctcttattttttattttattttattttttttttgagatggagtctcgctctgtcgcccaggctggagtgcagtggtgcgatctcggctcactgcaagctccacctcccatgttcaagcaattctcctgcctcagcctgccgagtagctgggactgcaggcgcccaccactatgcccggctaatttttttgtatttttagtagagacggggtttcactgtgttagccaggatggtctcgatctcctgacctggtgatccgcccgcctctgcctcccaaagtgctgggattacaggcgtgagccactgtgccctgccttttttttttttttttttgagacggagtcttgctgtgacgcccaggctggagtgcagtggtgcgatctcggctcactgcaagcttcgccccctgggttcatgccattctcctgcctcagcctaccaagtagctgggactacaggcgcccgccaccacgcccggctaattttttgtatttttagcagagatggggtttcaccgtgttagccaggatggtcttactctcctgatctcgtgatccaccggcctcggcctcccaaagtgctgggattaccggggtgaaccacatgcctggcctcttttttttttttttttttttttattgagtcggagtctcactctgtcacccaggctgagagtgcaatggcgcgatctctgctcaccgcagccttcgcctcccgggttcaagggagtctcctgcctcagcctcctgagtagctgggattaaaggtgcatgccaccacacctggctcatttttgtagttttagtagagacggggtttcaccttgttggccaggctggtctcgaactcctgacctcaggtgatccacctgcctcagcctcccaaggtgctaggatgacaggtatgagccactgcgcccggccccaggctgattctttaggggcctctgtcccctcccttgtcctcatgctgtggtcctgggggaaggcgacactttcagggctctctatctccatcctcatcggtccctcggaccacccccctcccaggaagctgccacccacctggggcattacctcccatcctcccaggatgggaacaccatctgctcacagatacctcctgatggtgtgtcccagccacctgaactgcagcccagggacccagccccatccctgacctctcccagggcgacccacagaaccccagcgtaaccccggccacgcggagccaaccccagctccacccttcctctcccacaggccagagtcctccctcgctctgggcctcccgccactgccaggcctccgtcccccaccccgaactcccctccttccagccgggctccagttcgcccccaacattcaacgcgctcctcctgttctggcattggtgtccccagctgccaaatggaactggagtagggggaggatcaggccagcccctgcaaaccgcggtctccccaggctctgtgaacactggggcctggtcgttctctggggtggggccgtcctgggcactgcagggtgctgagaagcgtccctggcctccacccactccatgccagggacaccacagatgtccccagactttaccaaatgtcccctgggagcagaatcaccctggttcagaccctctgggttaggggattccacagacccccaagagactctgcatcccacaatcctcagccctgctgaggtcccaggaggctgtgcacgttgaaatccacgccctgagtgggagggagagaggaggtgaatcccaggagctggggacccctggtttacaccgtctgccgggtcaggagttgatcctggtgtctggtgtgagcaggggacagatttagtgtttttttttttaatttaaataattaatgcaggtctctctttcttggccccatggacatcttatgtggatgactctctgtcttgggcactgccgggtgctgagaagcgtccctggcctctacccactccaagccaggagcacccccttcccagtcgtgacaggcacaaatgtccctggacacggcccagagtccccggcggggcagaacctccctgagtgggtccttgctgtagaggacgctggcacacagtgcgcctccagttcatgccccaggaggagccagggtgattcagcctgttttacacggggaggcggagacccagagacggacggcgacgtgctcagggccacacagcagagaggaagcaggtacaagacgcgaccccggggctgggtgcggtggctcacgcgtcatcccagcactttgggaggccgaggagggcggatcacaagttcaagagatggagaccatcctggttaacatggtgaaaccccgtctctactaaaaaatacaaaaaattagccgggcatggtggcgggcacctgtagtcccagctacttgggaggctgaggcaggagaatggcgtgaacccggaaggtggaggttgcagtgagctgagatcgcgccactgcactccagcctgggcgacagagcgagactccatctcaaaaaaaaaaaaaaaaaaaagaggaaaagaaaagaaaatgtaccagttgcccttcgatgaactggaaacacaacagagaacagaggccagaaagtccctgttcttttatttttatttatttatttgtgggtagtttttttttttttttttttttgagacagtctcactctgtcatccaggctggagtgcaatggttcaatctaggctcactgcaacctctgcctcccgggttaaagcgattctcctgcctcagtctcctgagtagctgggattacagacatgcgccactacgcccagctaatttttggatttttagtagagacagggttttgccatgtgcccaggatggtctcgaactcctgacctcaggtgatcagcccgccccagcctcccaaagtgctgggatgacaggccctgagccacaatgcccggccccctgtccttaaggagcttacattctggtgcgggtgacaccgtgaaatcagtgtacgggacatcagctggtaataaacgtcacggaggtcagaacagctgtgtcctcgggtgacgtcacctcctcggctctgcgccccgccgtccacaggcgcgaagccggagctggggttggcgaccgagaaccttcctgcctcccctccccagcaaggggcacgtcccaccaggcccggactgcccgtctgcccctgcagggcccctcgctctggtggcgggctcggtgagctctgctgcccggtctcgggagtctgggggagcgcggcgtcgacccctgtggagggaggactcgtgtttcaaggacagagcctcattaccatgcacgaccagccgcagctgaggccgcagaggcctttggcaggggggccgggccggcggcagggacggcgttggcggtggtggacgggagtgggggtctgtcctgaacaggtgggggtggtccctgtgctggcccccgccatgcgatcgcaccccaggactctcctcctcttcctaagccccagcatgtgcctggtgccgcgcgggtgctggaggcacagcggcttccacgcagacgcccgcagcaccacagcctgtgcacggcgcatccacgccctgttacaaatgttccattcaacgccttctagcacattcacagatcgtccgcccgcacctctagttccagaacattccatcacccccaaaaggaagccccgtccccttcagcagtcactcccagcccctccccagcccggacccccacccatctgcttcctgtctctgcgaattggcccgtctggacatctcgcatcaatgcaatcggactggctgtggcccccagggactggcgtctttcccccagcgtcaaggtgggggcacaaacaggtgagaatcgtgcagcccagctaatgagcagattgtctgaaaaaagcgctgaggagcggagctagcagggagctgtgggggggggggtctgttccgggctgtggctgtgtttgacgggcccagggaagaccctgtctgagctgagacctggatggggagccggggtcagcagggtacagctaagcgaggggcgaggctggccgggggtgtgtctgcgcttgcgggggtgggagccctagctggcaacggcaaaaccacacggggcactgaacccccagggaggtgtccggacttgcatccacaggcaatggggagccatgggaggatatggagcaagagcatggcgagatctgggttgcagttggaaggcgcgtccagctctgcgtggtccgaccccaggtcgccctgcctcacccaaacctggaaagtcttgactctcggctgcacctccatctccagagagcagggcactattatctccctctccacccggttacccacacgcagagctgtggccaatgatggagcatggggaggctgaactggacaccaggtgctgaatcaatggccccttgtccactccagagccaggacaagaactcacgggtcctcacctgaatcggccactgactgccttgggcagagacatcgaagtctctgagcctcagtttcctcttctgcaaaagggaactgcagggttcccagtcacttccctgggctgagcgagtgagaagtcaggcaaggaggttccttccggggaagtctccattgggtgccggctggggtcaggagcccagagtcctaggccctggtttgctcctggccatgtgttcacctcattcattcattcaacaaacattcattcaacaagcattcattcattcattcaacaagcacttaaaaacaatgcctgtgtgccaggcactggttttaagagaaacagcagtgaacaaaacagacaaatccctgctttctgtctatgggcaagaaacagaagaaacaagtaaagccgactgtcacatggcaggccatggtatgggaaaaaataaacagggaaggggggcctggggttggcagaatggggttggcagaatgaaggcctccccacagccagccggttctaatccccggaactgcagataaggccacccttacatggaaaaagggcctctgcagatgggattaagtaagaattgtgagatcaggagatcattccggatcatccagaggcccaacatctcacagggtcctcacgagaggaggcgggagggtgaaagtcagagactggaagaggctgtgctgaggctatgaagggatagggtggggccctgagccaagggatgcgggtgcctctgggcaatgggaaagatgggaaccggattttcacctggaatgcgcagcaggagggcccagccttggccatgtcctgctttttttttttttttttttttttttgagacagagtctcgctctgtcacccaggctggtgcgatcttggctcactgcaacctctgcctcccaggttcaagtgattctcctgtctcagcctcctgagaagctggaactacaggcatgagccaccacgtccggctaattttttgtattttcagtagagatggggtttcaccatgttggccaggctggtctcgaactcctgatctccagtgatctgcctgcctcggccttccaaaatgctcagactacaagcgtgagccaccacacccagcctcatgccctggttttacgccagtgaggcccattttggactctggcctccagaacggtgcaataataaatgtgtgtggttcccagccactgctgtcacagcagccagaactcatcagggtcattgcagtcttgaagagggaggtcgctcgaggcctcccggatctgtgcacctgccttctggggcgtggaaggcaggggacattgacctctccttggggtctgagatctgcaccaaccacggtgcaggcaccggccttgaggaccccctccccaaaactgtcccccacagcaggacctgggcaatggaggcctctcttccctgtacccccagctgtccttagatatggatcctggattaatggtcctggaagctcttagctcaaggagaaggcagagtgtggctgtgagtggccggggtccctccctagaacagaggtggccctaccctcttggtgcctggtggtgtgggcagctccttccctcagctcctggctaagcccccggcccttccaatccgcctcctctattctgagcagggctcttcccctccctcttgcaaggttacctcaaacacatccccctccagtccccgcccagggcaagggatgctgacatctcccttgggaaaggccctcctagaggccggccaaacccagagggggcaggagtgagaagtgtggtagcggtcccctctgtttccaggcccacagtgacctccatctccctccctctgccccccaccacaaccagggcggtgggagtaaggggagtgtgctctggatgccccgtttgagcttctaagacggatatgggaggagggggcccagcccctcacagcacgtggccctccaaggtctgcttttggggacacgctgccagtcccccaggacccctgcatcctctgccctagatccaggccctcccggggcttcatccatgacaattcattaagccctaattagcttccatctgctgttagtccccgtcaacccctcgaggggctgggggcctcccgacccactttccttcccagcctgtacacggggggccgtggactgccctctgcaggcagggcctctggatctggaaccagttttggagcacccactgtctacaccggccacttcacccactagcccagccctgactagggggaataataaagttcgttttggagagaaggagactgagggtcagagtgggccccagctcactgcacaacttagctgcagacagtcagcatttgaacctggatctgacgccagctcctacccacaaaatcccagctccccactagagggtgaagggcgctctttggaggcccgagattgacatgtggtggtgggcggcttgatggggcccacccggggccaactttgctcgcagagttcttcaagaggctctacctggtgacgaggtagtgactcagggggcgccggggaatgacagtgctgtgggaagagacatcaaactgccttctattcccactcagcaaggcaccttcaggtcccggcttaccctgggggtggacggctgaggctgagggaggccaggcagggctgctgccgtaaccatcgtgacctgagcatctgttttatggtggcaccacactgcagccgaggtgggcagcatctcatttaatcccatgtggggtggatctgagagaggggacgtcatttgccggaagtcaccggtgaagaccagacaggcagggcagggaaggctgagttgaaccctcctaagcccccatcccaccgcccggctgcccccttcctgccaccccacatcatcgagatggggacaggagctgggtctacaggggaagcccgtgggttcttcccactcagatcctgtctccgacgatggctgctgcttcggctcagagaacagccagggtaaggccatgccgcggcagcccaccccacaccagcctcctgataaagccagcaccaccctccctgaacctgtttccagcctgcgtcctccacctgaccactcacacctcacaccttctgcatcctctccaggccacttccagggagccctcctgggttgctctggttctcacagctctgttgtccctgaaggctccccccagccaagccccagatcgtccctctgcaaataccactgcacagcagacgcccgctccccacccccgccggagcaagggtgtctgcagcctcgctgcgtccatggtttagccagggaccgcttgctaaaatgcagcttctggggcacatcgcctcagaagttctgactcctcagaactgggggggccgggacaccggcaccgttagcgccccaagcacacgttgagaaacccagttacatggtggtctccagcgtaaggacccggggcttttcttgtgcccggaccaaggcacgaggtgctgctcccctaaacttgttgaatgggactcagggcctcccctggccaggccccagaggcccgggaggtggcggcacccactcagggtgcccaggcccaccatttctggtgctattcagacgcccccagagcagggggactcagccctatgcccccaggtccctccccgccaggccgggccgtcagctccagcgatggagcaggctccggtgtggaccccagataccctttgcgtcttccagctccgcacccccaggctggaccagacccggctcgggggagacagggcaggaaggcgcgggctgcaggctctattcggacgttccccacaccccagacccaaccagtgcccccttcatctcctcctggagaggagcgcatcctcccagcgtccccagtgccccggggagatgcccacccgattccccgctccttggcgccccagaggaggggcggggggccccagggtggggagttcgcccccaaagtttccagggggagcgtcgggggcctggcaaggagcgatgagcccgggaggggtgcgcggggcaatttcccccggctgaggatggggtcgcgggttgggggctttgggcggcagggtcgcagggtgcaggtgaggggtccccaggtctgcgggcgcgccccacgccgggccccggcacggccactcacctgggcggctccgccgcggacacggcgcgggctgcggcgcgggggccgcccggagccgacacgagcagccgccgccgccgccgccgccgccgccgccgcctcccgggctccgccgtgcgcgccgccgccgcgcgcaaccgcccgccggtctcctcggcgcgcctggcgggggcgcgcgggggctgcgctgggccgcgtgcgcggcggctggggccgcaggtgtgagaggccacgtgggcgcaggtgcggggacactgggagcgcgggtgcagaacccctccgtgcgcatcccgggcgcttcgtgtccgaggacctcctgtccccacggcctgggtgagcctgcggagacggccgtgccgtgcaataaacgcaggggcaccccaagtgcagcaggttgttccgtgtggaaccttctggaagctaccatcgcctcctctgccccccgtcccccacccctagtccaggccgccaccatctgcacctggacatctgccacagcccagcccaggcccattccttatgtggccctcagaggaagcccctcagaggaagcttagccactgggctccagaacctgccgtgattccctattgccgtgagggtcccgtctgcaccccacctaccctggaatttctctttctttcgttctttctttctttctttctttctttttttttttgagatggagtcttgctctgttgcccaggctggagtacagcggtgccatcttggctcactgcaacctccgcctcctgggttcaagcgattctcctgcctcagcctcccaagtagctgggattacaggcacccgccaccacgcccggctaatttttgtatttttattagagacggattttcagcatgttggccaggctggtctcaaacccctgacctcgggtgatccacccacctcggcctcccaaagtgctgggatgacaggtgtgagccaccgcccggctgcctgcactgtttggtctgccgcaccacctccttccccctggcctgtcctcactcactctttcccgggctccaccccctcagccttcctcaaacaggccaagtccctccagtcccaggcctttgatcttcgctgtgcccagcttggacagcctttctctctgtccctccatcgagcagcttggagcctctcagtttgtctaatgggcttgttccccaatgtgccttccgcctagcacacagcagcgcacacaccaagtgcactgcgagtgctcatggaaagttttttacctttttttttgtcttttttttttttttttttttttgaaatggagttttgctctcgtcacccattctggagtgcagtggtgcaatcttggctcactgcaacttccacctcccgggttcaggcgattctcctgtctcagtctcccaagtagctgggattacaggcgcccatgaccatgcctggctaatttttgtatttttaggggagatagagtttcaccatgttggccaggctggtctcgaactcctgacctcaggtgatccacccgcctcggcctcccaaagtgctgggatgacagacgtgagctactatgcccggcccctcactgcatcttctaaaagccacatttagcctccctgtctcacagatgagcaaaccaaggctgggagatgccatttgtcccaagtgaggggtgagaaggaggcctcgggaacctgtgtgtgtaaccttgccctgtctgcccccttcacccactctgcagtcctccccaccagctgtgtattcccagtggctttggcggtggcctggcactcacgcagccacctgtgactcaagcaggctctgttcccagactgtcgcgttggctggaggcccagaaaccgcatccctgggaggctgcaggccaggccccccacaggatgctgtggggggcgggtatggttcaattcctggccccagagaggtccagaaggacttcatgacaccccatgctctccccaccaaatggccctgggctgctgtgctgtgtgaccccagtaggggaggtctccttctctctctgaacgtgtttctttctctgtaaagtgatgctcctgatagctggctctcagggctcttggaggaaggtgttcattgagcacctactgtataccaggccaagggctggagggaggaggaggagacgcttccagcctcaagggggatttcttcggacagagggagcagatgcctgaaatatgaaatcgtcacaaagcggcgtggaagaggcagtagtgacaccgggtcccggaccgaagccaggggccagggaggcttcccggaggaggagacacttgctatgagtcctggagggtgagggatgccagctggggtccagtcgaggccctgcctgtgtaaccgtgggggatgtccctctagcctcggtctccacctctgcaaaatggagatcggaacagttcccatcttctcccggggctgcagagactctgcagtggttctgcccggtttgtggccagtgctcccgagcccttgggggtggagattgggccaggctcctactgcagggcctgagcacgggctgctccctctgcctagaacgcccttcccccagacctctgcccgcccctttccccctcttcactcgcgtctccaccccgaccttccatctctccctgcgtggcacatgcctgctaagatgtccagtaatttgctgatgggtccagtgcaagctctaccctctcttcttttttttttttttttttgagatggagtctcaccctgtcggttgcccaggctggagtgcagtggcgcgatctcggctcactgcaagccccaccgcccgggttcacgccattctcctgactcagcctcccgagtagctgggaccacaggcacccgccaccaggcccggctaatttttttttgtatttttagtagagacagggtttcaccatgttagccaggatggtgtcaatctcctgacctcatgatcggcccgcctcagcctcccaaagtgctgggattacaggcgtgagccaccgagcccggccccagccttttttaagacagggtttcgctctgtcacccaggctggagtgcagtggcgcagtcatagctcactgcagccttgaaccccctgggctcaagtgatcctcctaccccagcctcccgagaagctgggactgcaagtgagtggcaacacacctggctaatttttttattttttgtagagatggggtctcactaagttgcccaggctggtcttgaactcctggcctaatgtgatcttctcttcttggcctccccaagtgctagtattacgggtgtgagccactgtgcccagcccagtcttgtaatattatgtgtccatttactcctccccaaaatgatgagggattagtttttattattattttttaagagacagggtctcattctgtcacccaggctggagtgcagtggtgtgatcatggctcactgcagcctggaactcctgggctgaagtggtcctcctgcctcagcctcccaagtagctgggactacaggcatgtgccaccacacctggcttttttaaattagctttttttatatcttgtgagacagagtttcactctgtttgcccaggctggagtgcagcggtgcaaatcttggctcactgcaacctccacctcctgggttcaagcaattctcctgcctcagcctcccgagtagctgagactacaggcgcatgccaccaggctcattaaatttttgtatttttagtagagatggggtttctccatgttggccaggctggactagaactcctgacctcaagtgatccgctcacctcggccccccaatgtgctgggattacaggcatgagccactgagcctgggtcagattaactttttttttttttttttttttttgagacggagtctcactctatcgcccaggctggagtgcagtggcgcgatctcagctcactgcaagctccgcctcccgggttcacgccattctcctgcctcagccttccaagtagctgggaccacaggcgcctgccaccacgcccagctaatttttttgtatttttagtagagacggggtttcgccatgttagccaggatggtctcaatctcctgacctcgtgatctgcccgccttggcttcccaaagtgctgggatcaccggcgtgagccacggtgcccggcccccagattaacttttaattaacagggtcttgctattttgcccaggctggagtgcagtggtgcaatcatagctcactgcagtcctgaactggcctcaagtgatcctcccatctcagcctcccaaagtgctgggattacatgtgtgagccactgtgcctggcctggattcattattattcccactttacagatgagaatttggggactcagagaggttaggtcactagcctcaggtcacacagcatctgcctgctgaagctggggcttgacctcaggcatctggagcccaaggcttccaggactctacacgtttgcctcttagcagccaaggactctttccccagttacagagggtggccacttgtctggggccacacgggaggctcccaggccacctgcccccgcagcctccctccctgggacatgactgccactcccgcccgcatctggtcccgtccctcacgctggagagagcgagcgagaggaggagggcttttaattttagaaatggttcctgctgcagaagagttcctgctggttttcccaggcaggagagcacaggacaggagacccctcggccccaccacggccgtccccagaaggatgcccccctctgcgggctgctgcctccctgccccccagcctctcccacggcttccccatctggagccgccctctccgcccaggtggtaagtctccatggcaacgtcccatcacaggtggtcgtaaccttagcaaccaggtgctcccaccccaccgcctgggaggctcaaagccgcgcctgcatccccctcccacgctctccctgcccccgccccccgggcagctctccaagaggaaccgagggagatgcatcctgccagggatgctgggcccagagacttgagggacaccccaagatcacccagcagctgagctgctgggcctggggtgctccacgggacatcaaacccacctccctcgtcctgcaggatgcaaaagaaactgcacttctcgacatcgcctgggctcctactaggtgctgcgtccatgccaggctcaggcgccgtccctgccctcaggaggcttccactcaggacaaggggtggggagacactgaccgaggacaggaaggggacaatggccgggcgtagtggctcgtgcctggaatcccagcactttgggagggagaggcaggaggatcgcttgagctcaggagtctgggcaacatagcgagaccctcatctctttaaaaaaaaaattatctggacatggtgttgcatgcctgtagccccagctactcaggaggctgaggtgggaggatcgcttgaggctaggaggaggagattgcagtgagccaggatctcaccactgcattccattctgggcgactgagcaagaccctgtctcaaaaaatatatatgcatattggccaagtgcgctggctcacaccagtaatcccagcactttgggaggccaaggcaggtggatcggttgacgtcaagagtttgagaccagcttggccaacacgatgaaaatacaaaaattagctgtccccacaaataagtgacccccagagtaagttctaggtttagaatgaaatttatccatctactattaaaaaaaaattctctcagccaggcgcagtggccgagaaaaaaaaaaaacacaactctcctctgatttacatggaaattaatcacccacatcagattctgaaggaaactcttgcttatattacttttttttttttttgaggcagagtctcactctgtcgcccaggctggagtgcagtggcgcgatctcggctcattgcaacccccgcctcctgggttcaagcaattctcctgcctcagcctcctgagtagctaggattacaggtgtgcaccaacacgcccagctaatttttgtatttttagtagagacggggtttcaccatgttggccaggatggtatcgaactcctgacgtcgtgatctaccctcctcagccttccaaagtgctgagattacaggcgtgagccacagcgcctggcttaaccttttattatggaaaattttatacacaaacaaaggcttagagaatcacgtaatgaacccccataaagccatccccaaagtgtgatgcatctggttccataagtccctctccaccctccccaacagactatatcaaagcaaatcccagacacgaagtaatttcatccataaatatttgcatttctaaaatacaatgacttaaaaaacacagccaacaattccattatcattttttaagaaaatggacagtaattccttaatatgctcaaatatccaggcagtgtccagtttccctgactgccttctaaaattttttcacactttgttcagctcagaatccaaataaggtccatttactgcaattggttgatatgcctgtctctttctctctctctctctctctctctcttttttttttccagagacagggtctcgctttgtcacccaggctggaatgcagtggtgcagtcatagctcactgtagccttcaactcccaggctcaggtgacccccacccccgtctcagcctcctgagtagccaggaccacaggtgcatgccagcatgcccattaattttttctttttttggtagaaacagggtcttgccatgttgccccggctggttttgaactcctgggtttaagtgatcctcctgcctcagcttcccaaagtgctgggattacaggcatgagctgctgaaccactgtgcctggccttagttcttcctttctgctgtttgtcttatatgtcattttcctgtcttattgcaccgtgtggcacctccagtacaatgttgaaaagaaccagtggaactggacatctttcttttgtttctggccttagggggagagcacccagtccttcgccattgaggatgacagctgtagggtttttatagacatcttttatctggttgaggatatgccattctattcctagttgcgtgtttttaatctgcatgaatgctgaattttgtccaagtgagtgctgaattttctgcatctactgagatgatcatatggttttcctctcttatgctaatgtggttaatcacattgattcttgggtattaaaccaaccttgcattcctgggataaaccccacttggtggtcatgatggagaatcccttttatagacagctggattcaatttgttaatattaaggatttgtgcatcgatattcatgagggatattggcctttgattttcagtaatgtgttttggttacgctggcctcataaaacacattgggaagtgttccttcctcctctagtttctgaaagagtttgggtaggattggtgctgtttgttccttaaaagcttcaggatcaattctgttgttttccagagaagggggtctctctatgttgcccaggctggccttgaactcttgggctcaagccatcctcctgcctcggcctcccaaagcactgggatttcaggcgtgagccaccgtgcctggcctgggaacaattctgaaggtagaattgtcagcatttgctgatggctgggatgtgggaggcaagagaaacagcagggaagggcacccgagggtgtaagcctgaatcatggagctgtttccttggatgcagaaagctggagcggcacctggtggaaggagcattggtttggggtgtgcattaattttggggcgcctctggtgctggggcagagatgaggtcagggaaatggaagtcagaagcattttcaacaatgaaagcggaacccacgggcatctctgtctctgacttcgtgcccattacccccagcttcctgttcccttactgcttctggtctgtgttcactggccggcgtgcagaactctgtcttctgtcgggcactggaaccctagcggcctcgggcccgtcattcctgggtgaatcctgacccctgctggctctggtcagcacggtcgaggccagcgtggccacgcagtggcggtggggggcgggggtccacggagctgagtcctgaagggaggtagagagtgtgagacactggaggcagaagggcccggagttcatagacagacctaggcctgcccggaaagcccctgtctaatgggcaaggcggaggagcccggacttattcctgtggacaatgggggctttggggaggcgcagagtgggagggacctggtgagatcccaggagcttgagccctagccgtggagctgggacccccaggactgtcctttttattttaagacagggtctcgctctgtcacccaagctgcagtgaggtggcggaatcatagatcactgcagccttggcctcctaggctcaagagatcctcccacctcctcctccctaagtgctgggattacaagtgtgagccacagtgcctggccccaggggtgtgctaacctctctcaccctgggcggtccccaggctcaaaccaacaattcctgaaccctaggagctctcctcgtgggcacagcttcttctgtttacaaaccttcttcccttcatatccatgtccttgtctgggtccaggcaggaaatcgacacccagaaacaggcggtgatgggcagcaggggcctctgtggcagaaggtctcacgctacacggtactgtccgggtccttgcacgggtgttctggaggtgcagggaggcctcccctcggtcgttcaaggcaggaatggatctgcggcgtgaggccgacggtgacttgctttctcccagctcctggggccacagtgcgttcattcccctcccctcccctccactcccctcccctcccttcccctctcctccactctcctttcctctcctttcctttccttctttttttgagatggagtctcactctgtcacccaggctggagtgcaatggcgtgatctcagctccttgcaacctccatctcctgggttcaagggattcttccgcctcagcctcctgagtagctgggattacaggcacccgctgccacgcccagctaatttttgtacttttagtagagatggggtttcgctatgttggccaggctgctctccaactccttacctcaagtgatccgcccgcctcggcctcccaaagtgttgggattacaggcgtgagccaccgcacccggtctcattcccttttctctttgcctcttttaggcactgggacttcatttctatgcccacaagatgcgggtggctgggagccccattggcttggggcagaggaaaggcacggtggggtagatggagcggcaggcagcctacctcctacgctaggattctggctgtgttaccctgtgcaagctgcttaacctctctgggcctcagctgcctcatctgtgaacgggaatgacaaaaggacccgcctgaggtcctcctttgggggagggttccgtgaaccagagctaccttggagaaggcagtggggtcagtgtctggggcagacgccccagactgactatcagtaacatccagctcccgtcctccttcggaacctgcagtggggtggtaccctgaggatctctggctggtctgggggcaagaagggcccatctgtcttatctaccagggcctccgccaatgtctcccagagtggggcctccgaggacaagactcgagggctctcggccagcacttgaccgcgggcacaggcagcaaagctggttcccgggccaacggccacggccccgacatcgtgatccgagggctgcgctgaccatgggcagggagttgaaagggtgaggtctgggccaggggcagggggcagcctgcagttggcacggcgggctggctggcgggacctgctggggctggggctttatacggggccaggagagtggaggcctgggggatccagtgtctcgggccgggccggccgccgtgtcctcatttctctctcggttccctctctacgtctccgcctctgtttctgcctctccctatctctctccaaatctctctgtgccttctggctgtaactgggtttttcttctctgactctttgtaaaatattaaattttcaatgtaatgtggaatgtaaaatattaaatttctccttttaaaatattaaaagcaggccaggtgcagtggtgcgcacctgtcatcccagcactttgggaagccaaggtgggaggatttcttgagcccaggaggtcaaggctgcagtgagctgtgctcacaccacagcactctggcctgggccacagagtgagaccttgtctcttaaaaataaatacatagataaaattaaaagtggctttgtagttggctggaggtcctggactcctccagcgtatcctctagtgatgggcagctgggttacttccagtcttttccgagcaggtcagagtggctctctggggtggaaatggttgagaggaacaggctcattctggtctattctctggggacttctgtctgcctccccaggaagttgacctctccctctcccggtctgcacagccttctgtttttgtctgtgggcctcatttcaaagcttcgtgccctgggctgggcatggtggctcatgcctgtaatcccagcactttgggaggctgaggcaggaggatcacctgaggtcaggagctcgagatcagcctggccaacatggtgaaaccccatttctactaaaaatacatagccaggcatggtggcgggcacctgtaatcccagctacttaggaggctgaggtgagagaatcacttgaacccaggaggcggaggttgcagtgagctgagatcgtgccactacactccagcctgggcaataaagtcagactccattgcaaaaaaaaaaaaaaaaaaaaaaaaagcttcgtgctctgaactctgtccccacatgactgtggccgagggcccagccacagagtggatactcaacacctttttcaacacttcagagagaaggaattggatttcagagaggttgggacaccttccctaagccacacagcatgtggtggggggagccttgggctcagggctttgtggctgcagagggctttgcaaagttcatcagctcactaggaggtgacggagtgggcagagagcagtctacagtgtggggggctgttctgaggggtgcagcggtgaggcaggccttgcttcctctgcgggagaaaccgtggggctggaaaacgggacttccttcctctcctgcctccctgccgttcctggaggttctaacgaggccagttagcctctaaggccttgacacgttctcccactgggggttgaggcctctgggccactgggaccctgggtttcagcctttgcatctggctcagacagggcaggcaggtgtgccgcgtggacagcgtgttggtttccaggccggtcagctctggtgtcagggttgtgtttctccatcacgtgacatcctgatcccccacctgtcaaatggacgcagggaactggtcccggacagcgaggcttgtaggcttgtgggttgaacgtcagcagtccgggcacacctgaactctgtctgtccttcgctggaggctgtgaccccgcagctatcccagcaaacccccgccatccccggtgcgaggctggaggctggggcttgggatgaggtctcggccggtggtggcagggctgggctaggtggccggggccggggagggatgaacagcggatgcaggggttggccacgaggtccgataactaattccccagccacaggggctagtgccgctgggccccagcaaagccagtgtctatggggcccagatacccctgccgagaagccagctggttccacttattcggaggcagccagggagcgtgagcccatccagacccgaggctgagctccgtcctgttctgctgctatagcttcctggcaacctggaccacacgctgcctcggtttcccgagctggggatgaaggggttagcggccaggatgaccctctcacgctcaggtcataagggacagcctatcctctctcaacccgagtgatgaatcagacaggccctgccctcctctgggaagacagtgcctgggggacagaggtgcaaccaggaaacggagtccaggaggattgcccggctgtcgggaagagacatttaggggtatgcaggatgggctggcccgctggagtgtgggaagtcctagtgcaggtgtgggaggccggtgccagggcctgtatctgcccagtcaggacacgtttttaacattttttgtaggccaggtgtggtggctcatgcctgtaatcccagcaattggggagggtgaggagggtgatcactcgaggtcaggagttcaaaaccagcctggccaacatggtgaaaccccatctctactaaaaatacaaaaattaggccgggcgcggtggctcacgcctgtaatcccagcacatggggaggttgaggcgggtggattaccttaggtcaggagttcgaaaccagcctggccaacatggcaaaacctcatctctactaatacagaaattagctgggcatggtggcgggtgcctgtaatcccagctacttgggaggctgaggcaggagaatcacttgaaccaggaaggcggagtttgcagtgagccgagatcacgccactgcactccagtctgagtgagagtgaggactgtctcaaaggaaaaaatatatatattttttgtagagacgaggtctccctattttcccaggctggtcttgaactccggggctcaaagagatcctcctacttcaccctcccaaagtgctgggattccaggcgagagccactgcacccgacctcaggacatgctgtgagcacggaaggaacccagaaggggctggctgtaggtgaccagtccatctcacaagcgggggcagcagcgggggcaggtgttagctgcatgggctgtggggtctggcctcttgatgcaccccggctcctgatgcaccccagcctcctgatgcaccccggctcctgattcaccccaggtcctgacacacccagctcctgacacacccagcctcctaatgcaccccagcctcctaatgcaccccggctcctgacgcaccccggcctcctgatgcaccccggcctcctgatataccccagcctcctgatgcatcccggctcctgatgcaccccagctcctgctgtcttgggggcgggcctggggttccacaagcccctcatcagactgaggttccaaactcgcctgtctcggccttggctgtgcccgccttggtcactcctgaaccctcacccccaggagggaccatggctggtatttgatgagctccagggactgagtccaatctccaggaatccaggtttcctcagaaggtcaagggaaaagcaagattcggggctcagacacattgaggtttgcaattttattaagaaaacaaaaattcaacctatacaaaaaggaaaatgcttccgttccaggaggcggtactgcggtgggagcagcagccaagtccgcgggaaaccgagctgctcgggcctgccctgcaccccccgcgcccccggccaggctaggcgtcctgctgctggatgaaggggttggggatggcctccatgccgtcctgcgggcagattagcaccacggacgtgccccggcacaccacgaggcccagctgccgggtgtcctccgtgagcttgtactggtcgtcagggtctggggaggagcagatagagaggactgagggacctccaggaagcctccgagaccccccacccacccaagaccctcgctccgacctccccacctgcaccctgcaggcgccacgagcacgcagggacctcagacgggatgcgctctgtggggcaggtccccggctcccacggctgagacccatggcccctagagaccagtggcagctccacagacagcagccacagccctccctcactccacaaaccatgggaacaagaaggcccaggtgatagccggctaccccgcgtctcagagctcactggggcccaggcaccagggccgggaaccaggttatcagatggccggccagaatacaggcaccctgggcctcctggtctctgcaaggtccctggagccctagggggccaatattcaccctataacaaagaggctgggggccgggcgcggtggctcacgcctgtaatcccagcactttgggaggccaaggcaggcggatcacgaggtcaggagatcgagaccatcctggctaacttggtgaaaccccgtctctactaaaaaatacaaaaaaattagccgggcgtggtggcaggcacttggagtcccagctactcgggaggctgaggcaggagaatggtgtgaacccaggaggcggagcttgcagtgagccgagatcgcgccactgcactccagcctgggtgacagagcgagattccatctcaaaaaataaaaaaataaagaggctgttcatgtggggtggggaccatgtgggctggcaccccagggaagtgccagcaagcccaagacaagctctcaagaggctgaaggcgattaaaactcctcactactgtggtcctgcagtggtgggggcatgggagaaccatggggcccaggtttttaaactttttttcagacaccaggtcttgctctgttgctcaggttggagtgcagcagtgcaatcacagctcacagcctcaacctcctgggctcaaacaatcctcctgccttagcctcctgagtagctggggccacaggcacatgtaccgccatgcctggctaattacattttttttttttttgtagagacagggtctcactatgttgcccaggctggtctcaaattcctgggctcgagtgatcctcctgtcttggcctcccaaagtgctgggattacaggcatgagccaccatggccagctacaagaataaatcttgtctcagtatcaatggatccaaggggcaagaccctctctctcctaagtcctgacattcccccagtgcccgggccgggatggggacttgccagctggggacttgccgcaggagcttctgggggagagtctgaggacttggcggcctcactggggaggggagcgagcgggggcagggaaatgagggagggtcctctggggaggagacagggaccctgcgttcatagcgggaattaacaagggcagaagaggaaaggcgcccgagaggagccccacggcacgctcactaccccacagcaaggctgctctccgctgggcgccacagctcacgcctggaaccccagcactgtgggaggctgaagcaggaggatggcttgagcccaggagttcgagaccagcccgggcaacacagtgagacctcagcttatctcttttttttgagacggagtctcactctgttactcaggctggagtgcagttgcaccatctcggctcactgcaacctccgcctcccaggttcaagcgattctcctgcgtcagcctcccgagcagctgggattacaggcatgcgccaccacacccagcaatttttttgcatttttagcggagacggggtttcaccatgttggtcaggctggtctcaaactcctgacctcaagagatcctcctgccttggcctcccaaagcgctgggattataggtgtgagccattgtgcctggcctctcacgtcaccaatttaacaaaaattaaaataataaaacatttaaaaaggttgtcctctaactgtgccgggcgccccgtcagtgtgtagagaccagtgggtgagctggcagctcccgtctctccaggccccacaacaatggggtttcctgctttgtgaggacgtctaggaccagtgagcgctcaagcccgtccatcggccgccacgaggcttcacgttggtaactcagaggttttgtgggtttgagagaagaagagccagcagggagccccacggctgcccccctcgtcccactgcccccctcgtcccgctgcccccctcaccccactatccccctcgtcccgctgcctgcctcggccgccaccccactcacctcgcatgtactcaatggtgccgtccagcacaaggttgaggagtgggtcgaagcccttcaggattccactggcttggagaaatcaccgggggagagaaaagagaaggcatgagatccgtcctgggcgcagggcccgccccagcatggcccaggtatggggctaactgctccagggatggaggactgagggtaggagagggctcccgggagtggccgatgacagccgcctccagagtgatctccaccacaggcagcagaccacgtctgcggggggccagatggcaaacacttctggccgtgtgggccacagggtgccggtcacagctgctggctcgggctgcctgggtggaggcagcttcggtaatgagtccatgtgtggctgaactgcggccggtcagctctactcacaggcactgaactgtgaatttcatgtaatttccacatcgtgagacagtcttgttttgatccctttctagctatttaaaagtcataaaaacaattctcagctcaaaagcagcagcaaaacaggcggcggcacgtgtacgcggtgggaccaccagccaggaagaggagcgaggctggcgcaggccacagcgcggatgcgcctgaggacgcacctgaggacgtcacgctcagtgagagacgccagacacagaaggctgcgcaccgtgagatcccatttctatgaaatgtccaggacaggccaatccacaaagacagggaagggatgcgtgggtgccagggccagggatgggacaggcagtgatggctgatggggacagggcttcctgtaggggagacagagtgctccgctctgacagcggtgatgactgcgctgcctgacctgtgctgagtccctcagtgagttcacggaatacaaaagaacaaatcccagccctgctgcttagggcttgcggggagcaggcaacagagatgctctgagacccaggtgcaaaggcttcgggggctgagacggtctctgtggcttctctctccacgctgcctgccccacccctcaagcttcgccgccttgggccacaacttgccaacttaggttagggctctctgacccggtggtgatctctgccatctgatcctgctccgcagtgtctggtgacactgagaagggtgaagggggagctgtgtgtccccagcagaggccagcccaccctctctgcctgggactcccctccactgccctgcaggctcctgcagccgaggcccagcagcagctccacctctgcgctcactgaggggcgtcccgcagccaccccctccctgctctccttcttacccctgtcatctttcaggtgcttcctccagacaccaacccacagcccttacggtgctgccctctgcacgcccacgccaatctcaggaagcaggcaccaccaatctcgggaagcaggcaccaccaatctcgggaagcaggcaccccgggcattattctgcctgcctgtctcctcccaaggcagggccgagagcccgtccacggctgctccacacacaccgagggccgccctgtgcggtggtgcgggggagggtctgcaaactacgacccccaggtgaacctgcccgccgctcctctctgtaagtcagagtctcgctggcccaccaccacactcgcccgctcaggcgctgaccagggtggctctcctgctctgctggcatagctcagtggttgtgacagagaccatctgggctgcaaagctaaagatatttgccgtctggccttctacagagaaggtctgcccgcctgcatacaagcttccgtccacctccacaggcttcagcttccacctccacggctccctctctctttgctcaagtccctcccctgcaaaatgaaactcacctataagatggggtcagatgcagatgttcaggtccttggcaccagcctgaccagtgagcccgccctcctcacggggagagatgtgagcactgaggtaggtaggtctctaacatggagccaaggtgcccctcctctggagtgtgggctagggcctgtgactctgacgggacaagatgtcactcctgcgcttaggttatgtggcaaagacaaggaactttgcagctgtaattagagcccctgaatcagctgactgagccaatcaagagagaaacaccctgggtgggcctgactgcatcaggtgagcccttcagggaccaaaccctttctgctttttgtgtgtgtgtgtgtgtgtgtgtgtgtgtgtgtgtgtgtgtgtgtttgagatggagtcttgctctgtcgcccaggctggaatgcagtggcgcgatctcagctcactgcaacctctgcctccagggcgattctcctgcctcagcctcccaagtagctgggactacaggcatgcgccaccatgcccaaataatttttgtatttttagtagagatggggccttgccatgtaggccaggctggtctcaaactcctgaactcaagtgatctgcccgcctcagcctcccaaagtgctgggattacaggcgtgagccacagcgcccagttaattgttgtacttttagtagagatggggtttcgccatgttggccaggctggtctcgaactcctgacctcaggtgatccacctgccttagcctcccagactgctgggattaaggcgtgagcccccgcacccggccccaaaccctttctgaaagatgattctcccactggcccgaataactgaatatggacaaatgtcagctcagcctgcagcactgtaggggcagaccaccacggtggaacagagtcccgagctggcagcgtccgggagctgcaagtgtccctagccaacactggccagaacggggaccctggccctgcaaaggtaaggcactgagctctgtcaataaccagtgggctcagaagaagaccccaagatgatggaccccaaaaaacaaccctcagttacaacctcctgagagcccttgaggctgtggtaccctggctcctgactcacagatcctgtgagataataaaatggtgctgtttcagctgctaaatgggtgatttgctatgaagggcagaaaacaaagggaagcagtgtgaccagcaagagcggccgctcactcatgtccttccatgtccggagtcagcatggtgtagactgagaaaacattttattcatattcctttttctttttgttttgagacggagtcttgccctatcgccaggctggagtgcggtggcacaatctcgcctctggggttcaagcaattctcctgcctcagccccccgagtagctgggactacaagcgtgcgccaccatgcccagctaactttttgtattttagtagagacagggtttcaccacgtaggccaggatggtcttgatctcctgacctcctgatctgcctgcctcggcctcccaaagtgtcaagattaaaggcatgagccactgtgcctggcctcctttttctcttttgagactgggccttgctctgtggcccaggctggagtgcagtggtgcggtcatagctcactgcagcctcaaaccctagggtgaagccaccctcctgcttcagactcccaaattgctgggattacacacgtgagccgccccgtccggctggggcactgtgatttttaataactctcatgccacccagttgtctacaatccagggacaaagaggtttgggtccccgtcttacaaaaaaaagaaaccaaagatccaagaggctattgaataagtgacgtgttgtctgactgcttacttcctgctgagagctgcctcaattacattacatgcctgtaaccattcattctcaccaccccctgtgaagtgggtggagttaccagccccatttgacaaatgaggaaacggaggctaggagaaggcagctcacttgcccagtcaaaaatgctaggctgggcatggtggctcatgcctgaaatcccagcaatttagggggctgaggcaggcagatcgcttgaggccaggagtttgagaccatcctggccaacatggcctctctactaaaaatacaaatattagccgggcgtggtggtacacattaattccagctactcgggaggctgaggcacaagaatcacttgaacctgggaggcggaggttgcagtgagctgagatcgcaccactgcactccagcccgggtgacagagcgagactgcgtctcaaaaaaaataatgaaaataaataaaagaggtgcttccgcatgcgtcctcatcatctctgttgctgggtttatttgaaatttttaaagagggggtaccgacagcgggagcctcctcaccttcgcggcctccctggaactttacccggatcgtcttgtcgatgtacttggacaagtccaagatgctctcctttttcttcttctccttatcctgcggggaaagcagagcgcatgagacctggagcgcggcccgagctccacgccccccggctccagattccgccgcgcgctcaccgccatcttgtcgcgccgtgtggctcttcgcaggcaccgccccgcgccctttgacctcccccacgcgcatgcgcggcgcatgcgtggcccggggtctcggggcgttgctgggaaacatctgccgttggttgcggcgggcaccggccgacatggcggcagcggtggcggctgcgctggcgcggcttttggcggcctttctgctcctcgcggcccaggtgagcgcggcaccggtcccgacggcaccgcgggctgcggcccttcggcctctctgtccccgggctacgcgcaggaacgaccccgctcggcccgtcttgggggtccagcctcggggatccgccgtccccgcgttgtcggccggcggtgccggggctcggccgtgaccttgcgggtctgtccccggctcctctcctttccccgcctcggaggccctccgccgctgcagcgccactcacttcccaccgggtctgaaatttgtgccccctccatcctccggttctgcttctccgtttcggggtctccagttgccgccggggacgcctctctccggctctgtggccttgagcaggcggctgcccacccctctccgagcctcagtttccccttaggcggaacgggcacggtgctaagctaacctcaccctagggggtgcggtgggggaacccagaggcgtcccgcgcgtcccccagtaactggcagcatcctggagcggccaggagtccagccctgcactggggtcggatccccgctccatcttttactccgtgaccttggacgatggaattcgtgtgcagaaggaggaccgactatggtgtggattctggaggttctgtccagggtgaccagcgcccagggccaacaggccttcattatgttcattgtgtgtcatttgatgtaaagagtgtcaggttctagtggggacagtctacgagatcgcactgtcataactgcatcttttattttcttaattccaaatcttccctctctcctgagttcggtggctcaggcaatggaacctggagcagccccacaaatgcagcccttaaccttcactaccccctcagagttctcactcttaaggcgtcgccgccacctggctcctcagtctccactcctccagccccaccgctatccctctgctgtggctgcctttgtccaccacatccccagtccatcctcgacacagcaggggtgaccctttcaaagtatgtcagaccgtgtcgcatccagatgagtgcgccgtccagttgtgacctggctgctggggaagcctgcagctcattgcagtcgcttcactctctagtcttttctcttaccctgagatgcccctggtctctgcaaggctgtcgggccccctcggaagctttctgagaaccccagtcctacccccagctgctctgtcagccccctttggactccccccattctgcagccaggcacctagagctccccagacatttggaaggagggggaaagccagaggtggaagaaagatcacagaactctgtggagagagggactcagtttgcctgggaaggcttttccgaagcagatctattttttttttttgagacggagtctcgctctgtcgcccaggctggagtgcagtggcatgatctaggctcactgcaacctctgcctcccggttcaagcaattctcccacctcagcctcccgaatagctgggattacaggtgcatgccaccactcctggctaaatttttttttttttttttttagtagagacgaggtttcaccatgttggtcaggctggtctcgaacttcagacctcaggtgatccacctgcttcggccacccaaagtgctgggatgacaggcgtgagccaccgtgcccggccccgaggcaggtgttctgaatgatgagtaggagtttgccgggtcggcaggaggggaagggtgttggaagcaccagaagcagcataagcgggggctgggaggtgtgagagctggcaggttatttggggttggcaaggggtgggctgtggctggagtgtagggtggaataatgctggaaggaagggtttacaccctgaaagatgtcaccaccaaggaggcccggggggtgggccgtggagggttgctggagcaggggcacagaggagggggcagtggtgcgagtggccccaggcagagagtgaaggcagagcattcagcctcctagtctggatgacaggttgtctggtggaagccaggccgtggaaggcgcttggtgctggggtgcgtggactttaacctgggcgggctgaggagtgtgagctttatccggagggtggggagtcaaaggatgtgtcagagggacgtgagagagcaggtgttcctgccccttccagaaccctggttgtaaatacaccctgagacgcctgtccctggaggggggcagtgcttcgcggcagtggaaatttgagtccgattgcccaagaatgagacttgctctcagggcaggagcctggttggtgacagtcctcaactcgcttgcttgctaccattctgtgaccctgagcaaggaagtcgacctccccagtgagacacctcccttcccccaccccacggagcccgctcctcagcagatctgagctggagctggtggccctggctggacccggcccggctcctggaactcctcagtcttcccagaagggaggctctccccgcctggactcactggcctgtttcaaaggcccttgatgtggatgctttcacagtcacttggaagcggggtttctaagcctagtagtttctgaacctgtgtgcggttgcaaagcgtttgtgctgcaattgtgaaggatttggaggtcgaggcttgggctttgagcctgtccttgtagcctgagctttttctgctcctccaaatttcggtgggcctgtctagaactcagggccctcttagagctgtggcctttggaagaattgttccccgttcctttaactcagcaggtgaggaaactcttcccggtgagatgccgcgttctctggcctttgatagaggcacaggcttgtttttttaatggaaaaccagttttgcgaattgtggagaggaaaatgcatgaatgtgcttttgtgcttttaaatgacccttttagagagaagcagagaagcagttctatcagttcccattttacacaaaagacacttttcaccagagtccctgatcccatagaacagagcttggcaagtgttttctgggaagggctagacagtagttttgctgggctctgtggcccacgtggcctctggtttggttgcttggtttctcctgttgttcttccagagccggagacccttccttaggaatgggcttggctgtgttccaataaaactttatttacaaacacagaaggtgggccggactgtggattcttggcctctgccgtgacccataacatccctcctggaggaggggttctggggggctgtgttggaaggggcaccctccgggctcggcaccggggccagactaaggggtgctctcacgggcaggcagtctggtgggcagaactggaaagaaagggctcctgactctgcctgggctctgggggaggtcacatgggaggtgcttggagtggggctggggcagctgtgggaaggaagcagcattagccaagagctatgagacccccagtcgattgtggggaccggggctccgtgggctttcaccatgctgccaccccgaggtcaccagggccttgacccagatgctcccagaccaggccggagactttgcatgatttcagtgatgagggcccggctgttggagagcccgtctgtgcctgtgtgctggggttggtgtctggcaccagggacctttgggacctttagccaagccagagctgtccttccccagtcctagcttggcagagctgcgtctgcactgttttcccttgtggcgttgtggtgtcggcccgtttggtgcgcagctcagcatccgttcagacatgtggctgccatcctgttcctgatgaggcaaatggctgtggcctgtttgtttccgtgacaggtcccctggggaccagggggtgcggctgtctctctgtctgggaggtttacagcctggcaggagccctgcagccccagaaggctgagggctgggtgctcctgagaacgggcaggcctagggcatggggtgggtctccttggtccctggcacgtggtttttcttctgggacccctcctccctgtgcaggccgggctcccctgggggcccacactgagggtctgcagtgtggcacagcagctgggacctgggccccatcgctgtgagaccctctggtgactggcatcctggcgagatggagatgtctttgtcagctgctgggtgggggccctgggcaggggagcagaaggaaggtggggatggcaggtgcgggcggctggactgggctctgctgggagggggagcaggaggagggtggggatggcaggtgcgggcggctggactgggctctgctgggagggggagcaggaggagggtggggatggcaggtgtgggcggctggactagactctgctgggaggggagcaggaggagggtggggatggcaggtgcaggcggctggactgggctctgctgggagggggagcaggaggagggtggggatggcaggtgcgggcggctggactagactctgctgggaggggagcaggaggagggtggggatggcaggtgcgggcagctggactgggctctgctgggaggggagcaggaggaggtggggacggcaggtgcgggaggctggactgggctttgcgggagcaggaggaaggtggggatggcaggtgcgggcggctggactgggctctgctgggaggaccgtggttctgcctaggccagagccctgcagtgtccgccgtggtccctgcggtgggaggcgtggtgagcagtgccagcttcctgcttgtggaatccgtctttcctcatagctccatcctgctctgttaagcattaaattgaagaggtgggggtcgtcccttctggtccaggcccgtctactccgcagccctcctgggaggcgtccagggctttggggcctggtcctgccccctacttcattttgagagcgtggcaagggccccagcccgttctgtcctgggcgcggtggccaccacccctgcttctcttggctggctttggcctgttgtccccgttgtgtgtcaggggctcctgcccgtggatccgggccttctccctgtggccttctctgagctgctgctgctgcaggctggagagcaggaacttgaagccctggctggctgttccttctccctcctgcgaagtgggagctgctgtgctggactctgctgctttggggcttcatggggaacatgacgctgtctgtcctgctggtggcagcgtgacctgttgcaaacctcagcctgtcccactcaggacccggtgcccgtaggccccttggcccacctgcttcctgctgttctaccagtgggagctgaggggtgctgatctggggatccccctcgtctgggccccaccgtgtgcctgggcccccgtgtgccttggagcaccagccaacaagcagtgcccacggggctgtgggtcaaaggccacccagacctgaggggtgcagaggcttgcttgtccaggcctcccgcccaggctgggggccaggtccgctggggccctgccctgcttccctgctcagggctctgcccgtggctctgcccgtggctgtcattctcccaccgtgcccactgatcctgggaggcccaggaggtggtgcgatccctgttttttggtgcagaaactcgggagccacaaaggggtgacctgacacactcatggtcaccagcctggggctccctgaggaaggtgagccagtctgggtctttgctgtaaaccacgtatggtcacgtccctgtctgtcctgtcgagagggggaagcatcccagaccacctggtgaacatgggcgcccttcctggaggcgtcctcccctcctcgggcctgtttctcgtggggcggtgcagccccgcacgtcccgtgctgtggctctgactgctggccttgtcctgcaggtggcctgtgagtacggcatggtgcacgtggtctcccaggccgggggccccgaaggcaaagactactgcatcctctacaacccgcagtgggcccatcttccgcacgacctcagcaaggcagtgagtacccgctggccgggcgccgctgcggaggagaatgcgggggccccggggctctagagacacatccggctggggttgcaggaaagatccagaggcgagaggcaggccctgaccaggtctgggggactcttagctggcccccagttcccctgggcctccccaaccctggtcatcaatgcaagctgtccatgcggccttggggtgcagatccagaggcaccggccgagctccatgtggtagataagggtctctactgctccatgccggggaccctatccagtgggcccagacagaggggtcctcagaggagtaacagcagagggcacagtggggccccagggacgagacctgttcctttcaccgtcttcctgactggggcactaacacctgctgctggatgagtccctccctcagaggccccacctcctttcccacttagtcctcatgccccgcctcctttcccaccgcatccctcaggccccgcctcctttccactgcatccttcaggccccgcctcctttcccactgcatccttcaggccccgcctcctttcccactgcatccttcaggccccgcctcctttcccactgcatccttcaggccccgcctcatttcccactgcatccttcaggccccgcctcctttctcactgcatccttcaggccccgccttctttcccactgcatgcttcaggccccgcctcctttcccactgcatgcttcaggccccgcctcctttctcattgcatccttcaggccccgcctcctttcccactgcatccctcaggccccgcctcctttctcacttcatccctcaggccctgcctccttttccactgcatccctctggccccgcctcctttcccaccacacccctctgtccctgcctcctttcccactgcatccttcaggccccgcctcctttcccaccccatccctcaggccctgcctcctttcccaccgtatccctcaggccctctctcctttcccaccgcatccctcaggccccgcctcctttcccactgagtccctcaggccccgcctcctttcccactgtgtcccgccccctcctggagccctcgaggtgtgccggcgaagaggcactagcatcttcctgtcagctttatgcatagtgtgtgcgtgtgagcacgtgtgtaatcagtatgtgcctggacatgctcatgtgtctgcatgtttatgtgagtttgcatcagtgtatgtgtgcatgtgcctgagtgtttttttgtgtgtgaacacataggtgtgtgtcaacacatgtaataggtatgtgaacacatgtaataggtatgtgtgaagacatgtgcctgagtgcatatttctgagtttgtgtgtgtgagcacatgtgtactagatatgtgcatggacatgtgtgccttagtgcgtgtttgtgtgtcagcacacctgtgtgtgtgagcatgtgtgtaataggtgtgtgggggcatgtgcatgggtctgaatgtgtatgtctgtttttatgtgcacatgtgcctgtgagtgtgcatgcaatagttttgtgtatggatgtgtgagtgcatgtgtgtctgtatgtgtgcaggtgtgtgtaagcatgtagctacataatagttatgtttgtggatgtgtgcatgtgtctgcacatgtgtgcgtgtgtacatgtgtaataggtctgtgtgtatgtgtgtgtacatgtggataataggtttgtgtgtggatgtgtatgtgcctgtgtgtttgggttcgtgtgtgtgcatgagtgtgtgtgagtgcatgtgtaataggtatgtgcgtgtgagtgtgtgagttcatgtggcgtgtgtgtatgcatgtgtgtgtaataggtgtgtgtgcgtgagcttgagtgcacaggtatgtgcttgtatatgcacacgtgtgctgtgtgctctggcctggctgtgtgtgcgtgtgtgtgtgcatgtgtgtaataggcatgtgtctgcttgagtgtgagtgtgcatgtgtgtgcttgcgtgtgcatatgtgtgccatgtggtccggcctggctgtgtatgtgtgcacgtgtgtgtgcatgcactccagcctggctgtgggtgtgtgtgtgtgtgcgcgctggcctggctgcggctatgtgcgtgtgtgtgtgtgtgcactccagcctggctgtgggtgtgtgcgtgtgcactggtctggctgtgggtgtgtgtgtgtgtgtgcatgtatgcatgtgtgtgccgtgtgctccagcctggctgtggacgtgtgcttgtgtgtgcgcgtgttccggcctggctgtgggtgtgtgtgtgcgtgtgcgtgtgtgtgtgcgtgtgtgtcttggcttcaggggctgtgaggcccctgagagttggggctttgttctctgcacactggaaaccctcccccttctcacagatgcctggccgtggtggggctgcggtggggacccacttggtcttgctgagtgatctgtgacggctcgcggggtggctcaggtatcaggggacagccatgtctgtgaggactccggccccgctcagatgaggcagcccagcccgtcgcccagggtccggctgtgggagctgcagtagggatggctctgcctaggtgggccgaggccgtgcggggctttaggtgagggctgggatctaactcagcgcaggcttcaggtgggagaacgggcagctgggccctcctggtgactcacatcacgtgagacaacactgtgccctggcctttccagtctttcctgcagctgcgcaactggacggcctccctgctctgctccgcagccgacctccccgcccgtggcttcagcaaccagatcccgctggtggcgcgggggaactgcaccttctatgagaaagtgaggctggcccagggcagcggagcacgcgggctgctcatcgtcagcagggagaggctggtacggccctgtgcgtcccccgctgggccagctctcaggggcaggaggggggtgcaggaggcagagatggcagcagctggggctggtcttccgacttctcgctaaaggcagatccatctgtggggaggatctgggccgagtgtgaacatggggaggatccgggccgagtgtggccgtggggagggcggagatgagtctgttcttcctgagctgctggctggggctgtggaactttggccgtggtcttgttgggtgcctgtcctagagcagcccccaggggtgacggagaccacactctctgtggggatgggattggggtggcttctgaggagcaggtggcctggccctgagctggtcctttctgggtaccctggtgcccttgccctctagccggtggggccgtgctcgcctgtggtcctagccaggtggcctgaagcctggccccttttccatcttctgtgaaatggggctgtggttgagagctgggggcctggcagggctggtcacagcacagggacatgccgactgctgggctgggcagggtgcgtggccgcccctgaagtgtagttttggagtaagaaggaatggagttcaggaattccctcacagctctgcctgtggctctgggctgcccccgccagtgttgcaccctgagcctggcaatccacggaggcctggtgcaggggctcagggccgagggcagagcaggccgggcagagccgagagtgccatccctgtccgcacacgctgccgtcgtagttgagagaggccctcagtgggtgcggggctcaaggcggcttagtgggcaggcatgggctgtgacaagtatcactcaggacttgtatgtgcggttcgggagtcccacggccgagggagggattagtggcgcttttaggcctggggccctgttgtcaggtgaagaaggcttgatgcccttcggcctccctgttcttgggtcctcctggggggccggaggctgtcagctgcagagggggagccagcaggcgcccccagcctgacccgagcctcgagtgagggtcccaggagaggaggcgaatgggcacagagctgggggcccacccactgctgcgggtgatgcctgccgctccctcctctgggcccccaggtccccccggggggtaataagacgcagtatgatgagattggcattcccgtggccctgctcagctacaaagacatgctggacatcttcacggtaggtctgcgccggctcagacccacgctcccgaggagatggggcagggggcttcgggctggctgccgggggggtttgtgcctcagttggtgggatcagggtggtgggtgaggcgtggcccctgcaggccagggtctccagccccagccccacagcccacagctgcacgtcgacccatggctggcgggtggctctgacgcctgcctccggtgtgttccttgaggcagcgtttcggccgcacggtgagggcggcgctgtatgcgcctaaggagccggtgctggactacaacatggtcatcatcttcatcatggctgtgggcaccgtcgccatcggcggctactgggccgggagtcgggacgtgaagaagtgagtttcgcatcgtgcgtgtgctgtgacggggtcgggcggctctgacacgggccgggacggccagtcttccagaacagcagtgagtgctttggcctcggcaggcacggctcgccccgtggagcccttcgtttcttcctcaggaggtcctgggacagaatcagtctcttttcctgccagggtgggctccgggcacctggtgggtgtgtagggctgggcaggtgtggatgtggcaggtacgggcgtggcaggtgcagggctgggcaggtggctggggccagctaccctcttcctgctgagccgcctgggtctggggaggccccatgtccagggctctttatgcagatccaagctgcggttgctgcccacacgccagcctctggcccggcctagtggccaccccagctcaacccagggacgcgggccctgccaccctctgctgtgtggtctcctctgccctggggacgttcggggcggttccttgcacttcagtcccccccgggtcccctcctgctcccgggttttctgccccgttcccccgggtggctgtgggctcccgagccccgtgtcggccagccggccccagggccccacgaccccatggtgtctcccaagaaggtacatgaagcacaagcgcgacgatgggcccgagaagcaggaggacgaggcggtggacgtgacgccggtgatgacctgcgtgtttgtggtgatgtgctgctccatgctggtgctgctctactatttctacgatctcctcggtgcgcggccccgggcgggtgggccgcggcgtggagatgcagcccgccccgtgcggagggagggtggcgtgcgggcctggcccccggcctcacggccctgcccctgcagtgtacgtggtcatcgggatcttctgcctggcctccgccaccggcctctacagctgcctggcgccctgtgtgcggcggctgcccttcggcaagtgcaggtgagtctgccctgctggccccgacgtgcctgactctgtgcggtgatggccacggcccctttgccgccccatagccccccatggtgcaatattgctcagagtctacagcaggcgctccctcagtgctggcctggggctcctaggcccaggagcagggcggagtctgggcgagctatcaatggagcccaccagcagccaggcgccaggggtggcggggggagggtgcccttgtccccaggaaccctgccccaggtcgcaggccgaaccctgggttccccagggttctccggggaacccagaaggttccccacagcccagagcttggcctggctcttaggggtaaagggagctgctggggggtctccaacaaagtcagacctgggtctaggaagcggggctagcccagggggagacctttttgtgttgccgtccctgggtgaggaggtgggaggtctggagcaggcagggcctcgggcgaaggggcgcagcgcaggcgaggggctctgtgggtacagcccgtggcccccagcgcctgcccgggtcgggctctgccctgcccttggggtgcctactgttgtcatcgtgtgggatgtggagtttaatgaggacaacagagtgggggctgccactctgcagggggtgcctgggccggtcccaagggtggtgggcagtgggatgaggccgggagctggtgggcttggctctgactgccccgtgccccccaggatccccaacaacagcctgccctacttccacaagcgcccgcaggcccgtatgctgctcctggcgctcttctgcgtggccgtcagcgtggtgtggggcgtcttccgcaacgaggaccagtaagtgctgcttcccccgggccccggcgggcagcggagtcctcgggtgcaccagggctcctggggccctgactccctgccctccctggaggccgccccagcctggagctgcttcagcaccgcgtgatgaagagccctggccccgggctgctctgacagggctgcgagggcgtttcacctggggtttgtccgggtgtcatgggaaccctgactggaatccgggaggagaggccggagcccctgtggccaggagccacgtcctccagcctggatgggactcctttgtggggcatcgctgcccagggccacagtctgtcccccgctgtccctttcctggcacccacgtgcacgccgcaggttcgaggcccagggtgtgggcaccagggcacccggtcctcttggtcatgactgctgcggcttctgagcagtggtggaggtggggcaggcactgctccccccacgctcacctcccacgtggcctggacttgtggctgcctcccgctggccgggcctcccccatgaggccgagtgcctggtgccgtgttgggaggacagagctggcccgtccccgcccggtccccaccgctgtcgctgataccatctggcacttcctcccagccttcctgaggcagccaagtacgcttggctttggtgtgtattggagccacggcacgtttaactggcagaaggaagatgtgaaaatattttgaatcctttgtacacaaagagaaaatgaatcttttcagttatttccaagccaggaaactcgctccgtcacatgaagttagagcaggcctcagtcagctgggcgcaggggctcacgcctgggatcccagcatttggtaggccaaggcaggacgatcactttgcccaggagttcaagaccagcctgggcaacaagcgagacgccctatttaagaaataatataaaatcagaaaaaataactggccgcagttctctgggtgcttgaagtacgtggcgcctggaattggctgtaccagcgtctcccatggaggcctctgctgttagcagccgccccgccctggagatgtttttatcccattttcaaatgaagcctttgatgtttgagacgctgaggaacgctggggaactcgtccagcaagtgacaggcagagcctgcattgggggcaggggccagcggggaggggactctggggcttcgtggggccaggagagagccgaagttgcggctggctgcaggggccgtggccttgtgcaggaggcagttctgtgctttgccccagggcaccaaccgcatggcagccccacccactgtggacccagaggttctttgaggaaacctggtgtggcacaagttttaatttaataaacagtttgggcacgggggctcatgcctgtaatcccagcactttgggaggtgaggcgggcagatcacttgaggtcaggagtttgagaccagcctggccaacatgacaaaaccccatctctactaaaaatacaaaaaaatttgcctggcattgtggtgtgtgcctgtaatcccagctacttgggaggctgaggcaggagaattgcttgaacctgggaggtggaggttgcagcgagtcaagatcgtgccaccaaactccagcctgggtgacagagtgagactccatctcaaaaacaaaataaaaacagtttggaggggtcagtgcccaagccctcctgcgcacgcaccctctgcctggcccctgcctacagcctgtgacccctgcctacagcgtgacgcccaccatccggggacagtgactgaggggacgcagccggccaggcccgtgtccaccatcctggccccaccatccggggacagcgactgaggggacgcagccggccaggcccgtgtccaccgtcctggccccaccatctggggacagcgaccgaggagacgcagccggccaggcctgtgtccactgtcctggctgccgagtggtgggctcctctacctgcttccgcagggtgggccctggggtggggcctgtgccgccagccctgctggagttgtaacagcaggggtcctcccacaggtctggggtcctcagagtcatcccctgggcaggtggaagggcagtggggctgcgtgctggctgagagcaagggccctgtgtggctcgtgggaggcggcgtcctgggtggtcagccagcctctgccccggcgaggatgctgctttgtcttgcaggtgggcctgggtcctccaggatgccctgggcatcgccttctgcctctacatgctgaagaccatccgtctgcccaccttcaaggtgagtgcagggagggcacggctgcggggcagcatgggtagtgggggcccttcatcctagcctggcccgtgtggggctgtggtccttgcaggtctgtgctcctgctcactgccctggggatggccgcctaggcctgttgtgaagggtggggcttgaagattgggtcccaaagcccccgctgaggcggcctgggtgggtggctgcggggcggttcccggcaggggcaactcatgtctagatgaggtggtggtgagagtggttgaatagggctggaggaactggcctcaggtggtaccgggagtgcggggatgttgtcaagccccaggcggctgcactcccgtgagggccccacagcaccccaagcaagcggcatttgaatgcccaggatggccctctgtatccccagagccggccctgcgtggcacaggcctccgccctcccgtccccgccttcctgttacgtggagactctaaaagcctgacttttgcccgtaaatccctacctgatgttgcttccaaagctcctcctgcgtggtgcgtccctggcactgggcacgctctgctcaggttcctttaaaggctgcctcccaggaggaggcgctgggcctcatgagatgggagtgggggaggcacgggccggggtgggggccgccctcagccgtgggcttcgcaggcctgcacgctgctgctgctggtgctgttcctctacgacatcttcttcgtgttcatcacgcccttcctgaccaaggtaggcgactgcctgtccctgctccaccccatcaccccgctcccccgccccctcgcaacccccgccccatcaccccccccatcaccccgccccctcgtcccgccccctcgtccccctccaccccacaccgtgctcccctgccccccaccccatcaccccgctcacctccaccccatcaccctgctcccctgccccatcaccccccatcaccctgccccttgcacccccccatcgcatcaccctgccccctcgccccatcaccccactcccctgcccccccaccccatcaccacgctccctcactcaaccccattctgtgcagagtgggagcagcatcatggtggaggtggccactgggccctcggactcagccacccgtgagaaggtgtgtcttctgactgcagggtctcaggttgccatgggtcaaggtgttgcgcggagcggatagggctcgaggcatcccgcggccgggtgagggtcctggaggacattgtcctcttcccgtctttgcagctgcccatggtcctgaaggtgcccaggctgaactcctcacctctggccctgtgtgaccggcccttctccctcctgggtttcggagacattttggtgccaggtactgaggcgggtggagcacacgggtccacgctgtggggcagggccccgggcggctgaggtttgcctttgggagtgagtggcccgcacaccgtcggctggagataaagccctgagggtcagagtcgggcaggttggggccgttgaggcctgggtgcctgggcagcgagggcattgcctgggtggggtagggaccccctttgttcctagggagcggggaaggccccccgattgcagacagcctcaccccatcctgctcggggttgtgcaggggtccttgctggggcctggatcccgggtcccagtgagctcatgttgctgcagaaggcagagactgtaccctcgcagcctcagtgtccccagggtcctgccaggtgtgtctgcctggactttgttctcactgtggtctcagtttacccactgagagtcatggcagccctgtcccgagcgagcgtgtggcctgtctgtgaaatgacagcagccaccaggcagcgagaggcccacggcgcccacaggtgctcaggtgcccgcccgctcccaggaagcccctgctctgaggctctgcgggcccgagtaagcctccgccctgtgcctcccccagggctgctggtggcctactgccacaggtttgacatccaggtacagtcctccagggtatacttcgtggcctgcaccatcggtaagtgcctcggttgggcccgtgctggcctctctggctccagccccaccccgacttagcctctgtcctgaccctgacccctaaccccaaccccaaccctaaccctaattccaactctaacaccgtaaccataacaccctaaccctaaccccctggccactccgggagctgggctcgggtggctgggcctgtgcctgcatccccctctttctcattctccccgggcctgtgcctgcaaccccctctttctcattcttcctgggcctgtgcctctgtccccatcttcctcattcttcctgggcccgtgcctgcatccccctctttctcattctccccgggcctgtgcctgcaaccccctctttctcattcttcctgggcctgtgcctccgtccccgtctttctcattctccctgggcctgtgcctccgtccccctctttctcattctccctgggcccgtgcctccatccccgtctttctcattctccctgggtccgtgcctccgtccctgtctttctcattctccctgggcctgtgcctccgtccccgtctttctcattctcctttggcctgtgtccacatcctggtctttctcattctccctgggcctgtgcctccgtccccgtctttctcattttccctggcttccattgttctgttcttttcttttccttttctttcctgttttcctctttttgtctttttcttctttgccttgtcttctactgtttcttttgttatgaacgtatttacgcaaagtgctgttatctgttgacccacattgttttgaaaaatgtcccccaccgcagctggccctaaggaaagaagctgtggtgctttctggttcctgggcacagggccaggccaggcctcctctgccgagccacgcccccgaccctgccctccacgtggctccctaaacggccactcccagggccaggagagttcaggccggcctgtcccctcacacctgcctcctgcagctgcaggtgcccctggctttcccctcgcccgattttactgtcttcatgattatcctttaaaatcacggctgaggccgggtacgggggctcatgtctgtgatcccagctttctgggaggctgaagtgggaggattgcttgagtccaggagttcaagaccagcctgggcaacatagtaagaccctgtctctgcagaagaatgcaaaaattagccgggcatggtgacatgtgcctgtagccccagctactctgcaggctgaggtgggaggatcgcttgagcctgggagttcaaggctgcagtgagccatgatcgtgccaccgcactccagcctaggcaacagagtgagaccctgtctcgaaaaaataataataaaatgaaagaaaaaataaaaacacagctgcagagatttgtctctcctgaaacataacttgtcaagttgtccctgtaattcctgagactgaagccgctgaggctttataggtgccagccctccctgtttgtgtctgtctgcgtctgttgatgatggctgatggacacgtggatggcctaaaatggaccaatagggacgctccccgtggcatggcgtcagaaatacagagatgggtgttagaaaaagtgccgggagcagtgtgcttgctggacacagcggctctttttttaagagtgttctagcaaataattaattttctcagagctttattttgaaataatttcaaatgacagttgcaggatcgctacagagaactcccgtgtgccccgttctcagagggactggtcatttcttcacattcgcttgattccgttctctctccctccacacacacttacgcgctctcattcacctgattccgttctctctccacacacacgcgctctcattcgcctgattccgttctctccctccacacacacactcacgcgctctcattcgcttgatgccgttctctctccacacacactcacgcactctcattcgcctgattccgttctccttctctccacacacactcacgcgctctcattcgcctgattccgttctctctccacacacacacactctcattcgcctgattccgttctctctctccacacacgcgctctcattcgcctgattccgttctctctctccacacacacacactctcattcgcctgattccgttctctctccacacacactcacgcactcttattcgcctgattccgttctctccctccacacacacactcacgcgctctcattcgcttgatgccgttctctctccacacacactcacgcactctcattcgcctgattccgttctctccctccacacacacactcacgcgctctcattcgcttgatgccgttctctctccacacacactcacgcactctcattcgcctgattccgttctccttctctccacacacactcacgcgctctcattcgcctgattccgttctctctccacacacacacactctcattcgcctgattccgttctctctctccacacacacgcgctctcattcgcctgattccgttctctctccacacacacacactctcattcgcctgattccgttctctctccacacacactcacgcactcttattcgcctgattccgttctctccctccacacacacactcgcgctctcattcgcttgatgcggttctctctccacacacacactcacgcgctctcatttgcctgattccgttctctccctccacacacagactcacgcgctctcattcgcttgattccattctctccctccacacacactcatgcgctgtcattcgcttgattccgttctctctccacacacactcacgctctcattcgcttgattccgttctctctccacacacactcgcgctctcattcgcttgattccgttctctctccacacacacacactctcattcgcctgattccgttctctctccacacacactcacgcactcttattcgcctgattccgttctctccctccacacacacactcgcgctctcattcgcttgatgcggttctctctccacacacacactcacgcgctctcatttgcctgattccgttctctccctccacacacagactcacgcgctctcattcgcttgattccattctctccctccacacacactcatgcgctgtcattcgcttgattccgttctctctccacacacactcacgctctcattcgcttgattccgttctctctccctccacacacactcacgttctcattcgcgtgattccgttctctctccacacagactcatgcactctcattcgcctgattccattctctctctccacacacactcacacgctgtcattcgcttgattccgttctctctccacacacactcacgctctcattcgcttgattccgttctctctccacacacactcacgctctcattcgcttgattccgttctctctctccacacacactcacgcgctctcattcgcttgattccgttctctccctccacacacactcgtgttctcattcgcttgattccattctctccctccacacacactcacgcgctgtcattcgcttgattccattctctctctccacacacactcacgcgctctcattcgcttgattctgttctctctctccacacacactcacgcgctgtcattcgcttgattccgttctctctccacacacactcacgctctcattcgcttgattccgttctctctctctccacacacactcacgcgctctcattcgcttgattccgttctctccctccacacacactcgcgttctcattcgcttgattccattctctccctccacacacactcgcgttctcattcgcttgattccattctctccctccacacacactcacgcgctgtcattcgcttgattccgttctctctctccacacacactcgtgttctcattcgcctgattccgttctctctctccacacacactcgtgttctcattcgcttgattccgttctctctccacacacacgcgctctcattcgcttgattccgttctctctctccacacacactcgtgttctcattcgcctgattccgttctctctctccacacacactcgtgttctcattcgcttgattccgttctctctctccacacacacgcgctctcattcgcttgattccgttctctctctccacacacactcgtgttctcattcgcctgattccgttctctctctccacacacactcgtgttctcattcgcctgattccgttctctctctccacacacactcgtgttctcattcgcttgattccgttctctctctccacacacacgcgctctcattcgcttgattccgttctctctctccacacacactcgtgttctcattcgcctgattccgttctctctccacacacactcgtgttctcattcgcttgattccgttctctctctccacacacatgcgctctcatttgcttgattccgttctctctccacacacactcacgcgctctcattcgcttgactctgttctctctctccacacacactcacgctctcattcgcttgattccgttctctctctccacacacactcgcgccctcattcgcttgattccattctctctctccacacacactcacatgctctcatttgcttgattctgttctctctctacacacactcacgcgctctcatttgcttgattccgttctctccctcgacacacactcgctctcattcgcttgattccgttctctctctccacacactcacgcgctctcattcgcttgactctgttctctctctccacacacactcgcgctctcatttgcttgattccgttctctctctccacacacactcacgcgctctcattcgcttgattccgttctctctccacacacactcgtgctctcattggcttgattccgttctctctccacacacacacttgcgctcttattcgcttgattccgttctctctctccacacactcacgcgctgtcattcgcttgactccgttctctctccacacacacactcacgtgctctcattcgcttgattccgttctctctctccacacacactcgcgttctcattcgcttgattccgttctctctccacacacacactcgcgctctcattcgcttgattccgttctctctctccacacacactcacgctttcattcgcttgattccattctctctctctccacacacacactcacgctcccccgtgtactgcagttggccctcactagccatgggttcctgcagctgtggatttcactagctgtaggttgaaaatatttggggaaaagatttgtgttcttatctgtactgaacacatgcagattttttgggccagttttcccgaagcaatgccatgcgacagccattgcctgcggcgacatcacgtttgcgtttgtaggaacctatggtgatttatggtttggcaggacgcgggtgggttctaggcagacactgcaccagtttacgtcagggacatgagcaagggggtcctggcagccctcccctgcgggtgccaagggtggccatgtgtgcgtttgtgtatttacatgcacacgtatgtaaatcacaggctgcgttctcaggggactgggggcacggccccggtgggtggacaccgtgccctttgaccccaaacatttcactgggtgtctcctgagaacatagtttatatgcccacagctcagtgttcaagggttttctggtcaggcacatgtgtcaccttcggctgattttctcagaggttcatagaaactgcatcccagacacgtctcgcagccccctccgctatcacgtctgcctcccgctgtcctgcagctgcccggaccctgcccctccctgtccctctccttgccctggcccttccatgtcctcggtgaccctggctccggtagggtcagggtgggattgtggcccaggaggtgccggaaggatccatgtactttggggagcctgtggccctgccggctgaacccccactgtacctctcccgtcctcgcacacccctgccctccaccaaccccagcccgctcacgttcttcccagggaaatgggtggtggccctggcctgcctggctgaggtgatgcctcctctgtccccacagcctatggcgttggcctccttgtgacattcgtggcactggccctgatgcagcgtggccagcccgctctcctctacctggtgccctgcacgctggtgacgagctgcgctgtggcgctctggcgccgggagctgggcgtgttctggacgggcagcggctttgcggtgaataccagtttgctctgactgtgagaaatactcgcctagtgagccctaactagagttaaagttgagtgagacctccagccacagccagccctgcggccgcgacggggctcagggtcctggtaccttctgctttgggtgtcatgcgcgtgaggccccggtggaaggacgtgcgtgcagctcctgtgccgggtgggatgcgggggtgccaggtggggcccgggggtgccgggtgggacgcgggggtgccgggtggggcccaggggtgccgggtgggacgcgggggtgccggctgggactcgggggtgccatgtcctttctaaagttgcttctcccaaatagtagtgccccacctgcgtgggcatcgggcatccatcgcctctcctgccgagagcgaggcgcctgactgggggtggggccgcagggccctggacgaggggagcaggcctgccctggctgtggaagccctgtcccctgtcccccttggcaaggcagggggtggttggcaagggttaaacgtgagatgcagggagggcttacgccacgtcggttctgctcttgtgattttttgtgaacaggagtgggtgggacccccccttccagtgtgccgctcaggtgacttcctgggttcccgggactcaggcgcattgcgcccgagagctgcccccgcccctccgggcagcgcctcttggagtccatgaccgcccagggagcagccctgcgccatagggcgatcctcaggctgttgggcatgggtgcagctcctcccatagctgatctccctctgggggagatgccgcgcttctcagcggtgctggccgcgcatggggtcctacgtcatgtttttgtggaggttaaaccacacccgtccctgccgcactggtgtgatgcattgggtcgagctgtggttccagtgccgagctgggctcatgggtcccacagatgggaccatggcctgagaccaggccccagggagaagtctcctggggccagcacccccaccccaaaggtctccccattctgatgggcatttcagaaggttcaggagaagccggggaccaggcccaggggcgagagacggtagtccaggcttttctttggagaggctttgcacagctcccagcctctgctggcctcggatggccctcccgcggcacctgtgccgatggacagggtcctgggtgcccgtaggttatggagccggccccctccttgggtccagagcccctggggatggcgcctcattttgaccctgcccccgtggcctgcgggtgctgggtgtcctggcccctgccagggtcctcctctgggtccctgtctccgcctcacctctgcctcccttctcctgtagaaagtcctacctccatctccgtgggccccagcaccagccgacggcccgcagcctcccaaagactctgccacgccactctccccgcagccgcccagcgaagaaccagccacatccccctggcctgctgagcagtccccaaaatcacgcacgtccgaggagatgggggctggagcccccatgcgggagcctgggagcccagctgaatccgagggccgggaccaggcccagccgtccccggtaacccagcctggcgcctcggcctaggggaggggtgagacgctcgctgccgtgcccgccacaccaagatgttggggctgcctggcgcccactggagacagacagacagacgcctgtcccccgggaccgaggcctgtgccgtccccacccgccccaacatggtgctcatccttgccgagacccctgcggtctgtgcccgcgcccagcccagctgccccggctgcacgcctgctgctcccagctcgcccggctgccacaagctctctgcgggtccatcctccccaccggggtccgtcctcgcaggccctgcccggcctctctgcagaccctcaagcgtcgtctgcatgagtgagcaggcgtgggtggactctggccgcggccacacttggtgctcaccagctgcttcggccttcaggtgacctccctccccacggcatcctgctctccgggtggaagagcagctttctgtctcccagaaggcatcgcttttccctcttgagcagatcggagcccctgggaggtttggaagctgcctccaagcctaggacacggaccagtggccggggcggcctctggcccctgacgctggctgagacaggcccgtggggcggggttttggggcgtgaacaaggctggcagtaagtggacaagctgctcccctggctaaggccctgccctgccctcagccagaggtgcctggccatgcctgcacactcctccccattttaataaatggtcgcaacttctagaagtcctgctggtgccacctggtggggtggacgtctctcagactgcccttctgacaagcaggggtgggcgccaggcaggctgggtcaggccctcaggggtccctggagccctgggagggagggactgggtcgtgggaggtcctggtagctcccggcacccaacctcgcttcccgtgtgggccccgtgttgcttttctgctgagaggggcttgggcctcggttctccctgtggcagcggcattggtgcctgggttcttaaccctctggacccagcagctaggagcttctggaacccacgaggacatctgccactggcatggtctactcactgatggggtcctcctgactccagggcagagacgtccgtgcgggaactgaccgaggcgtggccccaggccccggcatcctcccctcgctgcacgtggtcacttccgaagcagcgctccctgtggccgcagagacagagcccgcaccctggctgtctgtggtgcctgggccccagctcccgcccgccacccgccctgttgagtgcggcctccagactcgagtccagaatctgtttctgtcaagtcagtcgtccccagctgcacacggggactgctgagcgctgcgctctcacgggtctgttccggacagagggtggcaggggtgagccctgatcccttacaaaaaataccagcttcccagggagtaatggcgccttcactgaagccattttgtacatggggacggggtggggacgtctcttttttggtgttggacgtttgaccagtggggaggggttcagaggcggcggtcctgtccttggctccgtctgtccgtgtggccttgctgccattccgtctgatcattaaacacagcttttgatacatatggcccggcctctgcctccgcagtgcacggcttggggcatctgctctgtgcaggtcccggtgagcagaactgagagctggcaggccgcctggctgtcctgcagaggacggattggaattgccaccgcagggccggccagtgctgtgaggtgcccagcgtcactcccatgggctctgtgggccatgtggtccctgtcacgcttctcagctctgccactgttgctggaaagcatcacagaccatgtgtaaaatgggccaaaataccttttacaaaattaaaatagagatggggtcttgcagtgttgctgaggctgatctcgaactgctgagctcagacaatcctcctgtctcggcctcccaaagcgctgcaattacaggcacgagccaccacgcccatccctcaagtaattttctcgccagaccctgaaattggaattgtatagcatcctcacgtctcaaaagagtttattattatttttttctctttaaaaatgcaaagacctgtcttagccgctttgggacaaggtttggtttccagctgctgctggctggcgctgggcctgtgggcacgtgggtgatggatgcgggtttgtgtgcgggccgagaggccagtgagtcctgagcatctgccaggcatcaggggctgctgtgtgtgttgttctagtctcacaaagttctccgctacgttagagaaagtgagacccaggctgggcatggtggctcacgcctgtaaccccagtgctttgggaggctgaggtgggaggattgcttgagcctgggagtttaagaccagcctgggcaacgtagcaagaccccatttctacacaaattacctgggtgtggtggcacacacctgtagtcccagctgttcaggaggctggggtgggagaattacttgagcccaggaggtcaaggctgcagtgaactgtgatcgcaccactgcactccagcctgggtaacagagcgagaccttgtctccaaaaaaaaaaaaggccaccagcaagcctctgaggccacatggctgtgagggatcagagacatggattcctccaggccctgagccaaaccacgactgcctggcagcgtgacgcccttggccttaatgtggaacagggtgaggacgcagcgggagatggaggctcaggccttaccactcacagcaaacctgaattcaaacccactggggaagggacggcttaatcacggaaagcgaattccagaatacttgaagtcacacttaggtttcggttttttaacttgagcagttcctcgatacgctccagaaggagcacccccaattgcctttccacgggggagctcactgctcggaggccactcggcgctggctctgaacacctcccctgtgtgcctctagtggtgatttgtcctgtccaggaaaagaaaaagtcgctatgtcattagctccggtggacctgagcctcagggctgaaagttacagtcaggactcagcgcacagagccctgggctcacaccacgtccacctgtgaccacctgcggtcgtgggcaagtccctctgcctccaactccctgtcctctggaaagagggttagtaatgtacctactgcaaggcacgacagccaggatgtcaccaaatcagccatctgattggacgcttagaagcagtcgggacttttgtgctagtgacacacttgattcaggaagacgggctcctgccaggctcagccggtgcctgagctccggggggtgtgcacacctcgactgtccaggtcacacacggtccagggatgtcagggagaggtagagctggggaaatggaaacaggctgcttgttggcactggggagggtattttgtttcttttcgtggggagcatccctctgtcttgcagtttaagttacaaagtggagcaatatggtaacaatagtgattttctttcactaagctgaccagagcttacacattttttatccacccacctatccatccatttatccaactggccatccacccatccatccatccacccacccacccatttatgtaaccatccatccatccgtccgtccgtctgtccatccatccatccgtccatgcatccatccacccacccacccacccatttatgcaaccatctgtccacacatttatccatctgttcatccacacacccacccattcacccacctgtctgttcagttatccatccgtccatacacataccctccatccactcatttatccaaccatctatccacacacccatccacccatttatccacccattcatccacccattcacctatccacccactcatccatttatctacccatccatccactcattcatctatccacccatccatttatccaacatccatccacacacccatccatctatccgtccatccacccgcccacccacccacccatccacacacctatccatttatccaaccatccatccacctatccacatacccatccacccagttatccaaccacccatccacttatccacatatccatccatccagccacccatccacacacccatccacctacttatccacccatccgtctccatccattgatccaccatccatttgtccatccatttacccattcacacatctattcatccatccatccatccatccatccatccatccatccatccatccatccatctacacacccaaccatccactcacccacacacccacccatccacacacccattcatccatctatccatccatccatccatccatccatccatccatccatccattcatccatccattcaaccacccactcacccatctatccacccatccacccatctacccattcattcatccacccacccacccatttatccatccatccacctatccacccacccaccaatccatccatccatctacctgcccatctagccattcatccatctacccacccctccactcatccatccatttgcccatccatccacccattatttacccctccacccatccatccatctgcccacccacccatccatccatctacccacccacccatccatccatttgcccttccattcaaccatccatccacccaccttccacccacccacccactcatccatttacccatctatccacctgtctactcacccacccatccatccatccatccacccatccactcatccattcatccacccactcacccacccatccacacacacacccatctatccatttatccacacacacacccatctatccatttatccacacacacacccatctatccattcacccatttaccgtccgtctgtccatccatccatccatccctccatccacccaaccacccatccacccatccacacacactcatccacccaccactcttcactgctgtgtgccaggtcctctactaagcaccccgtctggcccaggcagagagctgctatagctgcacgaggaaccgggactcagtgtttggggccaggtgggaagtcatcagaaggtgagagggtggagttctggaaagagtccaccaatggccctgaggaagagaggagggggttcccatggggtcacaggctcttctccacacggctcagagcaggttagaaatgcctcttgggaaccaaccgcagcctgcagcctgacaggagggtgggcagaagaatgcagcaataggaggccctgggtgtggagccccagcttgaatcccaggagctggatgactggctctcagggctgtagccacttcttctgcttaaaaggaggtgacagctacttttgtgaggccatcatgagaacctaggggagtccctgccgagtgccgggcacacagcacatactcagtagactggaccattctgcgggcgactggggaaacgtggacccaggagctggatcctccaggactgctctccctccagcaccaggcgtggctccccgggacttgcggcacttctcaaaagcaaatcaccaacaaagacgctctgccaaaggtaataaaatggggctggtctctaaaggcagttccaaaaaaaatttccgcaaagtctcttgagataagagaggagacagtggttctaacgaagtgcaccgtctccttcgacggcacggaggaacgtgaacaacctggtgacctaagcaggaggggcggccagcgtggcagcgggtggcgcgtcaaaactgaggccacccagtctgaccatgagggagaaaagcaccagacaaacccacttgaggcgtgtcctgcaaaacacctgacctgccttccccaggagcgggcagggtgtcagaaataggaatgtctgggaaactgcgacagcccagagagatccgaggaggcgtgacgcctaaatgccacgtgggatctcgggtggggccctgagcaggaaagggcattgggggaaactgaggaaactggaatcaagtgtggacttcacagtcgtgcatcaatagttgttcattggttgtgacaaatgtatcacactggcctggatgccagtaacaggggacccgggatgtggcgcacaggggagttctgaactgtctttgcacattttgtgggaatctaaaactcttctaaaacgtttaggctgggcacgttgctgactcctgtaatcccagcgctttgggaggtcgaggtgggaggatggcttgagcccaggagttcgagaccagcctgggcaacatggcaagaccccatctctatttttttaaaaaattaaaaatttatattaaaaatactgtagttccttcccgggcaacatggtgagacccccatctctactaaaaatacaaaaattagcctggtgtggtggcaggcggctgtagtctcagctactccagactctgaggtgggaggatcacctgagcccgggaggtcaaggctgcagtgagctaagatcgcgccactgcaatccagcctgggcgacagagaatgagaccctgtctcaaaacacacacacacacacacacacacacacacacacaaaatggttacaccagtgccctagaaaacgccctcagcacctcgcccccagggctgtcctgggcacacccctccctgcgccctgtcctgagtcacctgcccaggtgggcccacctgcccacagcgcccactctgcgggcaacccccaccccatggctcccagctgcgaagcccactcccatccctggctacccccaacccctccccatctccatcgtcttccactctgggttggctcccgccagggttgggaatccagggtggaggtggcagagccctgggacccctgtcctccggagactccaagcctgggcggcacccccggcccggagcaggaggtactggggaaggggcttggcagggggccgggggaggggcggctcccccacccggccccgccccgcccctcccttcctccagccccgggcccagctccggcttctgctccacttcggggtgggcgggatccgggcagtagcggtgcagcctcgtcgtccggagcgcggtgagtcggggtctcctgcgggctcagcctcccctcggaacagcccccacttcctccaaccccggtgagtcggggtctcctgcgggctcagcctcccctcggaacagcccccacttcctccaaccccattcgccaagccccggggctgtttggttgcctctggggctgtgtagaggtggcgtggcgggagtgtgtagatgcagccaggctgtgtagacaccaccggggttgtggagaggcagccggggctgtgtggacgccactggggtgtgtagacatggccaggttgtgtagatgcggccagggttgtgtggactcaggtgccgcgtgtagatgtggccggggttgtgtggacgcaggtgcggcgtgtagatgcggcaggggttgtgtggacgcaggtgtggtgtgtagatgcggcgggggttatgtggacgcaggtgtggcgtgtggatgcggccggggttgtgtggactcaggtgtggtgtgtagatgcacgtagggttgtgtggacgcagccgggattgtgtggatgtatctagcgtgtgtagatgtggctgagatttctagacgaggccaggctgggtagatgccgccagggtgtgtggacgtagccgggattgtgtggatgcagctgagatgtgtagatacagctggggtgtgtagattcggcctagttcctggaggggcctgggaccgccgaagccctccccatccctgttcccacccagagtcctcccttcttttctacccgtgaacttcacctaaagcaagaaccaagcatcagcctggagccctctggggtcaggggtggcgggaaaggggctgacagctactgggatggggtgcagggctggggtgggaggtgagtctggggtgtggtgcggggctggggtgggaggctggggtgggaggtggggctggggtgggaggctggggtgggaggtggggctggggtagggtgcagggttgggatggggtggggtgctgggatgggttggtggggtgcagggctgggatgggttggtggggtggggtgcggggctgggatggggtgggaggtgagtctggggtgggagggggggctggggtgggaggcggggctggagtgggtgccaggcatctgactggagcctctcctcccgccccagttctcaccctcggagccgcttctgagtaaacacacactgggatgtaacaattggaggtgggtgaagggcctgagatggggtgggttgttggtatttgcctgagggagggtcctcctggattcaattagccccggcaggaaacccaggctggggaccgtggcgttatccccgcatgaccgggaatgacccacattctgggaattagggcggggtccccaggacaggcgtccgtgctcgagggtcctctgtggcccagggaccttcgacttccttccgtcattttatagggggtcaaaccaggcctcggacccaggcatgggctccagaggttgccagaggttttggggacttgccaaagggttcaggcactgccccgcaggactgcatggccggaaacaccttgtgggccgcgtggtggccaccgccttgcagatcagggatgccccgcaggacacctgtggtcctggcttcctgacgccttcctgggggcctggctgggtggggctgtgtgagattctgggtgagttgtctgtgtggctgtgtgtgattgtgtgtgatcatgtgattgtgtgtgatgtgtggttgtgtgtggcaatatatataattgtgtctgtagctgcatatggccatgtgatttgtgtgtgattgtgtattatatgtgtgtgtggggtcatgagtgatcgtttatgttgtgtaattgtgtgattgtgtatggttgtgtgtggtcatgtgtcatgtcatgcgtgattgtgtatggttgtgtaattgtgtggtcgggtgggatcgtatatggttgtgtgtcgatggctgtataactgtgtgtatagttgtgtggtcatgtgtggttgcgtatagttatgtcatgatgtttgtgtgattgtataggattgtgtgtggttgtgcgagattgtgtgactgtgcagccatgtgtgtcattgtgcctgtgattgtggtggaggtgtaattgtgtgtatgggtgtgtgactgcatgtgtgagaccgtgtatggttgtgtgttgtatgggaggtttctgcagctgtgtggttatagtgtacggttgtgtgtgtgattgcatgatgagaattgcatgattttgtggatggctttgtgtggttgtgtatggttgtataattgtgtttgtgtgtgattgcatatgattgtggcaatatgtgtaatcgtgtctgtatgactgtgtatggtggagttgtgattgtatcagtgtatgactatatgtgtgaagttgtgtttagctgtatggtcattgtatgtgagatttgtggagttgtaacgtggttgtgtgtgtacttgcatgatgagattgtgtataatttgtggatggtggagtgaggttgtgtgtggttgtatgtggttgtgtgaggtgtgttttgtgagggtgtgtgtggttgtggtgtgtggttgtgtgaggttgtaatgtgtggttgtgtttggttgtgtgaggttgtgtgtggtaatgtgttgtgtgtggttgtgtgttgtgtgtgtgttgtgtgaggttgtggttgtgtgtgcaaatcccctcttcctagtcttctcatctggggcatggggatcagggtcccagcgctcaggctggcctgaccgtggggtaattgggccctgcagagcctcacgccgcctgcttgtcctgccacgcggaatgggagtccgtgtgtgccccgctgcccacagcgtgtgaacgtgagttggggaccatgtggcccactgcgcgctgggtcccgtccctaaagagcattcttggactgtctaaaattccctttgcagaatttggaatgtttagggtgtaaaatacggagcttggagagtccttaggcaaaaggtgttggtggccggttgcccaggctggggactctgtccgcggggcgagagcttgcaggaacgctggagcatcggagttcaaaccctgttgtcactgtggttggttaagggctttgcggagacgtggaggcatggtagatggatcgcaggtgagggcggaatgaaggcaaaggcgtcccttctctgatggcagacacatgggtggagatttgaggtaggagcagttgtgggggggtggggggacaggcgagagtgtgggagggagtgaggtcgcgtgattccccgtgcatctgtgcgtgcaactgtgggtgatggagctggtgcttggggaggcaggactggaccctgggtgccgacactggggcagggtttagagctcccggccctgcgcccctcggtcccccaggctcacctggcttagctggggagcagggttctcggggagcataacagggaagctgcccagcaatgtggaggagtcactagaattccaagaactctgtgtgtgagtgtgtgtgtgtgtgcgtgcgcgcgtgtgtgtgtgagagagagagagagagtgagagtgggagggagggagggagggagaggcagagagagccttaatctcctcctctgtaaatgggcatgctgatattagctggacctgtctcctgtataccctgggattattgggagggctggatcaactctcataagcctatgagccctacaccaacaggacgctgttggtataagcacatctcagcctcccggtagtcctgtagacccagcacctgtagtcccagctactcaggaggctgagatgggaggatcgcttgagcccgggagttggaggctgcagtgaactgtgatcacaccactgcactccagcctgggtgacggagtgagaccctgtctcaaataaataagtgaatgaatgaatgaatgaatgaatgaaagacgcataaatagaagaaatttagaagcccaagaatgaagctgaggcgaaccttggggttttattgaagttgatggttgacgcagccctgcaggctgttctaagccattgatgtttctgtgtgttgctctgaaatggatgcagaggataacatattctgggtgatccactcataactgcataaggcttcctttgttgttgttgttttgcagagatgggatctcactatgttgatcaggctggtcttgaattcctgggctcaaggaatcctcccaccttggcctcccaaagtgctgagattacaggcgggagccacggcacccagccctttgttgttttgtttacactttacctttatgaaaaaaaaaattgggggggataattttagttgtgaagatggtgcagagagtccccgcacacccaccttccacccagtgtccccttgcgttgacacctttgaccacagaacaaagagcaaaactgggccgggaacggtggctcacgcctgtaatcccagcactttgggaggctgaggcgggccgatcatgaggtcaggagatcgagaccatcctggctaacacgctgaaaccccatctctactaaaaatacaaaaaaaattagccgggcctggtggcgggcgcctgtaatctcgggaggctgaagcaggagaatggcgtgaacccgggaggcagagcttgcagtgagccaggatcgcgccactgcactccagcctgggcgacggagcgagactccatctcaaaaaaaaaaaaaagagcaaaactgacgcacgactgtgggtgccacactctgtcttcccaccaatatttctgttctacgttgcaatccaggatcccacattgcatttaggagctgtattaattttaaatgatacaactcataagtgattggaaggttattttttaatctctgcgttttcctctgggtcccttagtatcactcatgtttatcggcgtcttccctcccacacgattactgactcctttctcctctgtccacattataaagctaaaagaacacaagataccattgctgcaaatagttttctcacaaacacctcttcccatgaaagcctaacaaaaagaccatagacaaaatgaaaaaaaaaaggagaccaagcttattaaatttcctgtaggcttgctgagtgatttatttcatgatgttggggcgatggaggaggggaggatttcctgactagattcaggcctgaggacaggggacaggaagaaataagagaggccatggcgtagacaacagctgtctgttctataaacgggctttggctgccgtgggaccaaagatgcggaatcgaatgggatggacgtgtccgaaaactgtgatcatcttggattaggtgaaggaaaaaacaaacaaacaaacaaaaaaaacaaaaaaactacacagacaggtgggcaagacagctaaagagcccagaccgaggctgggggcatgatggtgcaggcttgtagtcccagctatttgggaggctgaggcaggaggatcacttgagcacaggaagttgagaccagctgggcaacatagcaagaccccatctgtacaaaaactaaaaaaatgagccaggcatggtggtgtgcacccatagccccaactatttaggaagctgaggtgggaggattgcttcaacccaggagttggaggctgcagtgagctgtgataacaccactgcactccagcctgggtgatagagtgagattctgtctcaaaataaataaataaataattttaaaaaagagatggagaaagagaagagaagaaatttagaagctcaagaatgaagctgaggtgaacctttgggttttattgaaactgcttggaaaaaaagggaaccccctgaatttctccttggagaggttgaaccatggttttgagcaactagaaaacattggccattaaaagcagagagtgagaccctgtctctaccaaaaatttaaaaaattagccgggtgtggtggtgcacacctgtagtcctagctactcaggcggccgaggtgggaggattgcttgagtccaggaggttgaggcttcagtgagctgtgatagcatcagtgcactccagcctgggtgacagagtgaaaccctatctcaaaaaccaaaaaagtaaataaggaacaccagacagaagagccctgggacctgccgtcctgtgtattagtttttggttactgcataacaaatgtctctcaaatttagccaattaaaacaacagacatttattctgtcacagtttctgtgggccaaggatttgggagtgatttatctgggtggttctggcccatggtctctcatgaggttgcagttaagacatgggccaggggctgggtgcggtggctcacgcctgtaatcccagcactttgggaggctgaggagggcagatcacaaggtcaggagatcaagaccatcctggctaacacgatgaaaccccacctctactaaaaatacaaaaaattagccgggcgtggtggcgggcacctgtagtcccagctactcaggaggcggaggcaggagaatggcgtgaacccaggaggtggagcttgcagtgagccaagattgcgccactgcactccagcctgggcgacagagcgagactccatttcaaaaaaaaaaaaaaaaaaaagacatgggccagggctgcctcatctgaaagctcgtctgggcctggaagagccacttcaaagctggtgtcctcatgtggctgttggtgggaggcctcagttcctcaccacatgggaatcaccatagtgctgctcgagcatcctgacaacatggctgcttgcttcccccagggctggtgattcaagggagagaaagaacaaagccatagtgcttctatgatctaacctcagaagcctagatccattgcttctggtatattctattcattacaagtgagtcaataagtccaacacacactcggagagggaaattaggctctgctaggtgaggatagcaaataatttttggagatatttaaaaaccaccacatctataaccttgggcaagttacctaactcttcggtgcctccaattcatctttggtcagaatagaaccagtctcataggagaaatgtggcaataaatgagatgatgactgtaaatattgtttaatacaacacctgtcacatagaaaatgcttatgtacttttttttttcaagatggagtcttgctccattgcccaggctggagtgcagtggtggaaacttggctccctgcaacctctgcctcctgggttcaagtgattctcctgcctcagcctcccaagtagctgggattacaggtgtgcaccaccatgactggctaattttttttttttttttttttgagagggagtcttgctccgtcgcccaggctagaattcagtggcacgatctcagctcactgcaagttctgcctcccgggttgacaccattctcctgcctcagcctcccaagtagctgggactacagtcacctgccaccatgcctggctaattttttgtatttttagtagagatggggtttcactgtgttagccaggctggtcttgaactcttgacctcaggtgatccacccaccttggcctcccaaagtgctgggattacaggcatgagccactgcacccagcccatgactggctaatttttgtatttttagtagagacagggttttaccatgttggccaggctggtctcgaactctggatctcaagtgatccacctgcctcagcttcccaaaatgttgggattataggcatgagccaccatgcctggctttatccacttacttttattaaaggtatatttttcagtgttacagctcttgaggaatgatgtgccagctatagttatcaaattgtaactctctggatttgtggggccggagaggcagagggaaataacttgctctttcaggaggcattaggctacggaacggagagactgcacatggcggctgcgtttttcctggctccccttttccaatggttaagggaagacaaatgggaattaagcagttccaggctctgcatgtggcagaaaccatcctaccatctactcccatgggtgcagtttgcaaaatttgagagaccaaaaaaaaaaaaaaagcagagaatgtgaagggcacattagggtatagctgaggatgtcaggcaggagacacagcctgtgcctttgaaggcactgaggctggaccatgctgtgcatgtttggggatcggcgaggaggccagtgaagctggggctgaaggagggaggggttggagatgaggacagttagacccggtcgctgtggggaggtttgggcagaggtgggatgtcacctgacgcgggtcttagctgtctccctgaggcttcccgttgagaatagacccagggaggggaagatggaagtggcattttgtgagcctgggcgatgccctgcttagaccaggctagacatggcgtaggggcccaattctagagctaccctgcagacggtctgacaacgtttttggatggactgggtttgggatgtgccagggcatcaaggataaacccagtttttttttttttttttttttttttttaaagacagagtctcactctgtcgcccaggctggagcacagtggcgcaatctcagctcactgcaacctccgcctcctgggctcaagcaattctcctgcctcagcctcctgagtagctgggattacaggtgtacgccaccatgcccggctaattcttttttttttttttgagacagagttttgctctcattgtccaggctgtagtgcaaaggtgtgatctcggctcactgtaacctccacctcccgggttcaagtgattctcctgcctcagcctccagagtaactgggattacaggcgcccaccaccacacccagctaattttgtatttttagtacagatggggtttcaccatgttggccatgctggtctcaaactcctgacttcaggtgatccacccatctcccaaagtgatgggattacaggcgtgagccactgtgcccggccaaacccaggttttaaaaaaaatttttttgtacctgggtgagtacgaaagtggagctgctgtctgagctgagaagactgtgggaggagcaggcatttttgtgaagaggagactgaggagggatatgagagctcagtttggtcagtgtcaaatttaagaagcctgttaatgattgtattagcttttgtttgtttaagacagggtcttgctctgtcaccctcacccaggctgcagtgtagtggcttgatcgcagctcactgcagcctcaacctcctgggctcaagtgatcttcctgcctcagcctcccaagtagctgggactacaggtgtgtgctaccaccctggctaatttgtaattttttttttttttttttttttttagagatgggatctcattatgttgcctacactgatctcaaagtcctgggctcaagcgatcctcctgccacagcctccaaaagtgctgggattacagacctgagccactgcacctggcctagttttctgcaaattaccacaaatgtagcaacttgaaacacctcctgtttactgtctcatggttttgtggtttctgtgggttgggtggctgggcatggtttggctggatcctctgctcagggtctgacaagactgcagtcagagtgttggctgggctgtggtctcatcagaaactcaactggggatgcccaaatgcagtggctcatgcctgtaatcccagcactttgggaggccaaggctggcaggtcacttgaggtcaggagttcaagaccagcctgggcaatatagcgaaaccccttctctactgaaaatacaaaaattagccgggcatgatggcgggcaccagtgtaatcccagctacttgggaggctgaggcaggaaatcacgtgaacccaggaggcagagattgcattgagctgatattgtgccactgcactctagcctgggtgacaagagacttcatttcaaaaaaatatatacacatcctggctaacacggtgaaaccctgtctctactaaaaataacaaaaaaattagccaggcacagtggcgggagcctgtagtcccagatactcaggaggctgaggcaggagaatggtgtgaacctgggaggtggagcttgcagtgagccaagatcacgccactgcactccagcctgggtgatagagtgagactctgtctcaaaaaaaaaaaaaaaaaaaaagtgggtaggttggccagatgtcccaggttgcaggctacaccatgcctggctcattatttttattttttgtggagatgggggtctcgctatgttcctcaggctggtctcaacccctggcctcaagtgatcctccctccttggcctcccaaggtgctgggattacaggcgtgagccaccacgcccagccagaaacttgggtttaaaatggactttgcattataatgagatgggtaattcacccaggatgaatccagccttcagcttttgctttcttttgcttttgctttctctctctgtctctctttatatatatattgcccagactggacaacattgcaagacctcgtctctacaaaaacttaaaaaaaaaattaacccagcgtggtggcatgcatttgtagtcccatctactcgggaggctgaggcaggaggatcccttgagcccaagagttcaaggctgcagtgagccgagatcataacactgtacttcagcctgggtgacagagccagaccctatctcaaaaagaaaaaaatgcatgacaatattatgtatcttgatgaccgaggtttttggaactcactttaatttttctcccagggccaatacctacctcctgtcaccctactccctggccccggatgtcctctgcgaaggctctgagcccacagctcactcctgtttgaaaacagacactggcaggtctcagagtggcattaaggacacgctggccctaaaccaagactctccccagctggcctcatctggaggctggaaacagacattgctattgcctcgttcacagtcgctcactcgttcacagtcactcgtggctctgctaacaaagtccttgcctagtccctccttgggggcccccacacggctccagatggttcctgacagatgaagacggaagtcggtaggttggccagatgtcccaggttccaggttaaaactggaatagctgccgggcgcagcggctcacgcctgtaatcccagcactttgggaggctgaggcaggcggattgcctgagttcaggtgtttgtgactaccctgggtgacacagcaaaaccctgtctctactaaaatacaaaagaaaaaaaaaatttagctggatgtggtgacgggcacctataatctccgctacctgggaggctgaggcaggagaatcggttgaacccaggaggtggaggttgcagcgagccaacatcgtgccactgcactccagcctggcgacagagcaagactccgtctcaaaaacaacaaaaccaagaaaaaaaaaaaacaaaactagaatagccttgagcaaaccagggccaggacaactggtcaccccaaagcaaactgactcactgggtgacagggactctcaccccatcaccaccgcgttgggatgagtcggacttcctgcctcccgcctgggccagaggatgccgagagagtggcgtctgttgggctggaggctggtcgagccacaggctcaatttggagacatcaatgctgatggttcatgattttggtgcgatctcggctcactgcaacctccgtctcccgggttcaagctgggattataggcgcccgccaccatgcccggctaaattttatatttttagtagatgggggccaggctggtctcaaactcttgacctcaagtgatccgcctgccttgacctcccaaagtctgggattacaggcgtgagccactgtgcctggccccttcttttttcttccctgtatcttggtgcgcagttcagatctgagatcccacgtccattcttctcgaagctttttcctgtcacgcaggcgggcgagtctcctcctactgatctctttggttttacagctacacacttttctttttggtttgcctgggggcattctcacatatctctcaaacccggccagtaacaccctcctacgttgctttaaaaaaaaaataaatgatgcctcttcttgtcaagggcttcctcccacctcaaggtcacctgtcaacctccatgcccactcttgtttctcgaaatgggctatcttccctccttctacctgtgtatttcattctctcccacccccagtctttggaaaaaaagataataaaactctagaagatatttttactctgagattagcagtgtgaaggaccttccagaaccttctctctctgcctttctctgaattaaaacgctcgcttgtctgagaccggctgtctccattgcatctgagtgataagagaaagattcattgaaacaggcaggttttatttttggtctgtccagcactaaatgattttcttttggctgacttatttttttttaactctaaacagactttgcagcttagtaagaatttatttcaatttagaaatatgggtgttctaaactttttttaaattaaaaaaatttattttttcctgagacaaagtcttgctctatcacccatgctggagtgcagtggcacaatcatagttcacttcagccttgacctcgtggggacaagtgatcttcctgcctcagcctccaaagtagctggaaccacaggcgtgcaccaccacccctggctaattatttttattttttgtggagatgggggtctcgccatgttgctcaggctggtctcaacccctggcctcaagtgatcctccctccttggcctcccaaggtgctgggattacaggcatgagccactgcgcccagccagaaacttgggtttaaaatggactttgcattataatgagatgggtaattcacccaggatgaatccagccttcagcttttgctttctttttttatttttatatatttattgatttttgagacacagtctcactctgtcgcccaggccggagtgcaatggagcaatctgggctcacttcaacctctgcctcccgggttcaagtgattctcatgcctcagcctcccaagtagctgggattacaggcacgccaccacacttggctaattttttgtatttttagtagagatagggttttgtgatgttggccaggctggtctcaaacgcctggcctcaagggatcctcccactttggcctcccaaagtgctgggattacaggcgtgtaccaccatgcccagctaatttttgcatttttagtagagacggggtttcgccgtgttggccagggtggtctcgaactcctgacctcaggtgatccacccacctcggcctcccaaagtgctgggattacaggcatgcaccaccatgcccagctaatattcgtatttttagtagagacggggtttcgccatgttggccaggctggtctcgaactcctggcctcaagcgatccacccgcctcagcctcttaaggcgctgggattacaggcatgagccacagtgcccggccaacttttgctttctttgccgtacacgtggcctagggaggttgcagcttggaggttttcagccaactttttgcgaaactaatacacaccatgctgatttattctttaggaaacttgtcagcttttcactgaagcaacaaatgcttttgtctgtaccaactatttgcaaagtgctttacagggagatctgagcaaggcagagaggtaaagaaggctcgtgtctatccttgaggagttgagaggagtctagaagtttctgtacattgggcaaatctgggcagtgctttataacattttcccgagctacagagctctgacccctccgcggcttcactgcttttcaagctattacatcagcaccaaagattcctttttcttgtattcacggtgacaaggagaggctcaaagtcctgcctgtccattaatttcatgctgatttctctcaacaatctttttttttttttttttttttttttttttttttttttaaagaggtagggcgcggtggctcacgcctgtaatccccgcactttgggaggccgaggccggtggatcacctgaggtcaggagttcgagaccaccctgaccaatatggtgaaaccccgtctctactaaaaaatacaaaaattagctgggtgtggtggtgggcgcctgtagtcccagctacttgggagactgaggctagaggattgcttgaacctgggaggcggaggttgcagtgagccgagatcgcgccactgcactccagcctggagacagagcgagactccgtctcaaaaaaagaaaaaaaagaaaacaaaaacacccctcaaaaacagggtctttgtttgagaccctgttggaggcctctgcgttgctctggttgtctctggggagcccctaaccaggcttggaagaggttcttggaggaaggtttctcctctgaccaccggctggctctggccccttacccacgagcctctgtggccttggtgaggtgggcgccgagtgcatacggtggataagcctgatgttgtgttgattgtattgtgttcttctccagacagcagcaaaggaggggaagagcgtttcctttagggaccatccctgtagaagttcctgctctccgcttcggtttgttcacaaactacatatcctggcaccagggggcacagaacttggctccacgacgaaacaggtcccgtggaggagctggtgctgggcggggctgcgcctgactcactctggtgtctgctgaggtccttccctggtggagactcctgcctccaactctatccccttttggtctcttcctccacggcactgacctcatcctttccttctgttggccaccaagatggaggccaatggccccacgtctacacgtggcagtttaggagccccactgggaagaaggcgtctccgtccctgcttctgtgagttgaaccataagaaactgatcttgttctatagactttggtcttaaaaagtgacagttttataaagttgaaactcaaggatccaaaagaacttggtgtcctgcttgggtcatatgcaacctcttgggtccatcactgatggggatggaggggtgggccctgtgattgctaggtcagggtctagtgtggaccaatcactgatggggatggaggggtaggcactgtgattgccaggtcagggtccagtgcggaccaatcactgatgggggatggaggggtgggaactgtgattggcaggccagggtccagtgtggaccaatcactgatggggatggaggggtgggaactgtgattggcaggccagggtccagtgtggaccaatcactggctggagatggaagggtggaagctgtgattggcaggcttgtgttcagtatggaccaatcatcactgatggggagagggagtaaacactgtgattggcagacctggtggctagcaccatgatcgaccaccccaccaggacagcagggatgaggtggaccttcattgaagaaagggatgctgggcagacaaaaaacacataccctagaaaattacaactgaagggacaaagcagatcaacgacctggggaaactgaggcctggagaatttcattgccttgctgggactcctggaagtctcaggatgagtgaggatctggatattatgagttgggcagctcccatttgcagggtgttcctcctgtaaagatgccagatgcccagtaaaccattcggctctctccgaagtcagcatcgagtagcattgtccccagggagcgtgtgttggcttcctggtgctgctggaacaagatgggcctccctgggccaaagtcaaggtgtgggcagggctggtccctcctgggggctccaggcgagaatgtgttcccgcctttcccagcgtctagaggcacccacatcccttgctcggggccccttcctctcccttcacagccacagcgcagcacagcctcttccagtctccctgaccctcaccctcccacctcctctcatgagaacactgtggggatatgaggcccgccagatcatcaggattatctcccatctccatgcccttcactcagtcccacttgcagagtcgctttggccatggaaggcaccacatttacagattctggggattaggacctggatgtcagagttattattctgtggccacaggaccgacctgagatgtcatttcttttttttttctttttgagatagagtcttgttctgttgcccaggctgaagtgcagtggcacgaccttggctcactgcaacctctgcctcccaggttcaagcgattcttctgcctcagcctctcgagtagctgggattacaggcatgtgcccccacgcccggctaatttttgtatttttagtagagatggggtttcaccatgttggccaggctgatctcaaactgacctcaaatgatccgctctccttggcctcccaaagtgctgggattacaggcatgagtcgctgtgtccagccccaagatgcatttctaggaacgtacccagagacactgtcagattctctgtaccaaggagtcaaggctctttctgacctttgcttggttcaaaggaagattctgccgcctgatttctgcctgctctccacccggcctgccagctgccaggatgcaatttctctggcctccaaggaaggccaggcagggtcgcgccggggcagaggcacaccagcgcgtgtctggcccagtgtgcccagaacccgagaaactggagtggccacgggtgggcggctccctcacgctggcttctcctgagtccctttctgttcacagatccccactcctggctatccgcatgctggtcatttctgcttggagacagttcaggtgtgtcccacagttgctgtccctggggctcttggctctattgttaatggccaccggctgtgacggctcacatttcagtcctgcatatgtcagttcctcgtactttctttctttttttactgtatgtatgtatgtatgtatgtatgtatgtatgtatgtatgtatgtatatatgtatgtatgtatgtatgtatttgagatggggtctcactgtgttgcccaggctggtctcaacatcatgggctcaagcagtccttctgcctcagcctcccaaagtgctggtattacaggcatgagccaccacacctggtcttcctttctttccttctcccctcccctctcccctctcccctctcctctctcccccccacccctctccccttccccctcccctcaccttcccttcccctctcccctctcccctcccctctcccctctctcccctctcctctcccctctctcccctctcctccccctcccctacccctaccccttcccctacccccctgccctcccctctcccctcccctctcccctccccctccctctctcccttccttccttctttccttccttccttccttctctctctctctctttatttttttctgagacaaggtctcactgtcacccaggctggagtgcagtggtgtgatcataactcactgcagcctcgaccttccaggctcaagtgatcctcctgcctcagcctcctgagtggctgggactacagatatgtgccactatgcctggctaatttttacaatttttttgcagagacagggtctccctctgccacccaggctggcacagtcatagctcactgcagcttcgatctcctgggctcgagtgatgaaccctcccacctcagcctcctgagtagctgagactactggcatgcaccaccatgaaaggtcaatttttaaattttacatttcgtagagatggggtctcactatgttgcccaggctggtctcaaactcctggcctcaagcaattctcttgccttggtttcccaaagtgttggaatgacaggcatgagctgccacacctgaccccccttttccttataaatcacccagtctcaggtatttctttacagcaggacaaaaatagactcagacaactgtgtttaggcattacttatagggtgacaactgtcctggtttgattggaattgagtggtttcctgagacatgagactttcagtgctgaacagggacagtcctgggcaaactgggaccattggtccctgtaagtgttgacgggacactgtgtcagtctgttctcatgctgctaatgaaagcatacccaaggctgggtgcagtggctcatgcctgtaatcccagcactttgggaggccaaggtgagtggatcacaagcccaggagttcaagaccagcctggccaatatggtgaaaccccatctctactaaaaatacaaaaattagccaggcatggtggtgcacacctgtagtcccagctacttgggaggctgaggcagaagaattgcttgaacctgggaggcagaggttgcagtgagccaagattgtgccactgcactccagcctgggggacagagcgagactccgtctaaaaacaaaacctacctgagactaggtaatttataaaagaaaaagagttttaattgactcacagttcagcatggctggggaggcctcaggaaacttacaatcatggcggaaggaggagcaaacatgtccttcttcacatggcggtaggagagagaagaatgaaagcccaacaaaggggaagccccttataaaaccataagatcttgtgagaactcactattatgagaacaggatgggggaaagcatccccatgatttaatgatctccacctagtccctcccatgacacatggggattatgagaactacaattgaagatgagatttgggtggggacacagccaaaccatattagatacctggagggagaagtcaagaatgtaggtggcaaaactttctaaatgtgcttgatgtggaacagctctccagcaacgtgtgtcctaagacaaagcctgagcttctttctcttttttttttttttttttttttgagacagagtcttgctctgtcgcccaggctggagtgcagtggcacaatctcagctcactgcaagctccacctcccaggttcatgccattctcctgcctcagcctcccgagtagctgggactacaggtgcccgccaccacgcctggctaattttttgtatttttagtagagatggggtttcactgtgttagccaggatagtctcaatctcctgacctcgtgttctgcccgcctcggcctcccaaagtgctgggattacaggcatgagccaccgtgcccagcaagcctgagcttctgagtgtggtgcacagcagccttccagatggggctgttgggccttcctgcctcacctctcacagttctcctaccccaccccacactaggccctgacattccctaaactaactttctttctctttctttctttctttctttctttctttctttctttctttctttctttctttctttctttctctttttctttctttccttccttccttcctctctcccttcctctttttctctttctctctctctctctctctcattctctcttttctctctttctttctctctttctttcttttctcttgcccatctcaagtgcagtggcacaatcacacctcactgtagtctcgacctccttggctcactgatcctcagcctcaagagtagctgggactacaggtgcatgctaccatgcccagctactttttctattttttatagagatggggtcttattatgttgcccaagctggtctcgacctcccatagtgctcagcctcccatagtgcctcagcctcccatggtgctgggattacaggcatgagccactgcacctggctggttgtaattaactttagttttaatagccacatggggccagtggctgccattttggaccttgctggtgttgtatgactgtttatgctctcagctcccacttagtgggagaatcatgcagagagtcatgagactgaggcaagaggatcatttgagcccaagaaatcgaggctgcaatgagctacaattgtgccactgcaccctagcctgggtcacagagtgaaaccctgtcttaaaaaaaaacaacaaaaaaaccccacaaaaaaccaggtacagtggctcatgcctgtaatcccaggactttgggaggccaaggtgggtggatcgtttgaggtctggagttcaagaccagcctggccaacatggcaaaaccccgtctctactaaaaataaaaaaaaaaaattagccaggcatggtggcatgcacctgtaatcccagctactggggaagctgaggcagtagaatcacttgaacctgagaggcagaggttgcagtgagccaaagttgtgccactgcactccagcctgggcaacagagcaagactccaccaaaaaaaaaaaaaaagacagtggattcttccccagtcaagcctcagatgagaatgcagcccagctaacacctggattgcagcctcatgagatgctgagcagaaggcccagctaaaccctgtcagaatcctgaccccaggaagtgaggaggtaacaagtgcatgttgtttgaagctgctaagtttgtgctgatttgttacacagcaatagctgactaatacagtttctctacaatagccttgacttccttacttctgccacagggattctagatactttatccctgccatgtaggatccgttccttccactggaggcttactcaattcctatttatccttccgaacttgaataactcatcactctctcagaaaaccctcccctgacggcgtgtctaaatcaaagacccctgtacacagattcaaagtttctggttgtgcttctagttttgagccattcttgtagcatcatgttaatggatctgggcctcttccacttggattgaagctctctgagctcagagaatcgtatctgtctcattcagggttcgacgcagccaggcctggcccatcgtaaaggttggctggatggagagagtgaaatgaatggcgcttctatgtttgatgctaaatagctgtggagttctttctgtgaaccaataatggtgatgacaagaccatttagagaacacaggaatccttagaaaacccgcggggcagggtcagcagaggcagctggggttgaatgaacactgtgtgtgtgtgtgcgtgtgtgtgtgtgtgttggggagtgagctcatactctaaatgtgcctttccagctctaatcacagaagtgaatctcggtgtcttttgtttctaaaccatccatcaagtgattcttggagattctctggctcgtctgaaggcagttcaactcaagcgtaagagtaaatgggaaagtgtggtgcagcttcactccccgctgcccctgcctccccaccgcccctgcctcgctccacgctgcccctgccttgctccatgccgcccctgcctcactccccgccaccctggtacatctctcctttctcattggctctggatggtagcggccaggcatggagtggctgttcccagaggaacacgttcccctgaggagggaacattctggctgggccccagcatagggttgccagactcaacaataaaacatttagcaccctcggagacattagaatttcagatatgtattcattcattcattcattcattcattcatttattttgagacggagtctcgctctgtcgcccaggcttgagtgcagtggcgcaatctcagctcactgcaacctccacctcctgggttcaagagattgacctatcttaggctcccaaatagctgggattacaggcgtgtgccatcacgcccagctaattttgtatttttagtagagacggggtttcactatgttgtcaggctggtctcgaactcctgacctcaggtgatccacttgcctcagcctcccagactgttgggataacaggcatgagccacagcacccagccagaatttcagattaacaaccaaaacgtttcttttttttaaacagggtctcactctgtgttgcccaggctggagtgctcactgcaacctctgcctctgaggttcaagtgattttcctgcctcatcctcccaagaaaccatgtgccaccatgcccggctaatttttttattttggtagagatggggtttcgccatgttggccaggctgttctcaaactcctgacatcaggcgatcctcccaccttggcctcccaaagtgctgggattacaggcgtgagccaccgcgcccggtcaaaacatttttttagtaggagtcggagaatgtcctacattttgcacaagagagacatacttatactaaaatacagattagagacagaattcttcagagaaacaggaccaattgagtggatacacagacatatacgcacagatgcacacacagatgcacatgcacacacacacagacacatgcacacacaaatgcacacgtacacacagaccacacatgcacacatacacacatgcacacgtgcacacatacacacatgcacacatgcacacacaaaagcacacatgcacacagatacatacgcacaaacgcacacatccacacatacacagatgcacacacgcacacacagatgcacacccgcacacagactcacacatgtacacacacacagattgagatttattttagggatttggctcataccattgaggggctgcaggtctggaatctgcagggcaggccagagacctagggaagagctgatgctgcagtctcaagcccaaaggctatctggaggcagatttccttcctcttggggaacctcagtcttttaaggccttcgactgattgggtgaggcccaccacattatggagggtcacctgctttatttaatatctaccgatttaaatgttaattgggcttggcgcagtggctcacgcctgtaatctcagcactttgggaggccgaggcaggtggatcacctgagatcaggagttccacaccagcctggccaacatagcaagatcccgtctctactaaaaatacaaaaattagccaggcatggtggcaggcacctgtaatcccagctacttgggaagctgaggcacaagaattgcttgaacctgggaggcagagtttgcagtgagccaagattgcaccactgcactccagcctgggtgacacagctagattccgtcaaaaaaaaaaaaggagaagttaattgggctgggtgggtgcagtggttctcagcactttgagaggctgaggcaggaagatggcttgaagccagtagttccagaccagcctgggcaacatagcaagaccccgtctctaaaaaaaaaaattacgatttttaaaattttcttagaggcagggtctccctacatgatccaggctggtcttgagctctgggctccagtgatcctcctatctcggcctcccaaggtgctgggattacaggtgtgagccactgcaccctgactctacaaagaaattttttaacttagctggcatagtggtacacatccatattccagctactctggaggctgaggtgggaggatcgcttgagcccaggaggtcgaggctgcagtgagctatgatcacaccactgcactccagcctgggggacagagtgagacccccccatctcaaaacaataaaaataaataaatagatgttaattgtatctaaaaattaccttcacagaaacagctagaataatgtttgaccaaagaaccaaagcccggccaaggtattgcatagactgaaccatcccagggacacacttaggctacaaaaggatgtttgattgtctgaaactcaagctccatgcggtgttctgtatcttatctgcccaccgaggcctggttttcatccccacgggtgtccagagcaactccactccctccagagaagccctcggccacgtgggcacgtccaggggaccccgcccggggaaacagaatggcattgttcccccagcttccttttctgtgggtttctaatggggaaaagtgtgttggaggccaggcatgaatcattctccgcccacgcagcagacacagcatcccaggggagctgaggcggaggggaggcaatgagatccacctttgcagacaatgtggaggtgatcccccaccctctgcagagaaaggcgtccctgcagactgagaacatgcagagtttgaggttaaggtctcttggggtctcacgagagtaaaagaatgtaagctagagaaccaggtgtggtggctcccgcctgtaatcccagcactttgggaggccgaggcgagcagatcacccggggtcaggaattcgagaccagccaacatggcgaaaccccatctctactgaaagtacaaagattagctgggtgtggtcaggcgcggtggctcacgcctgtaatcccagcactttgggaggccaaggcgggaggatcacgaggtcaggagatcgagaccatcctggctaacgtggtgaaaccccgtctctactaaaaatacaaaaaattagccaggcgtggtggcgggcgcctgtagtccaagctactcaggaggcggagtcaggagaatggtgtgaacctgggaaatggagcttgcagtgagccaagatcgcaccaccgcactccagcctgggcgacagagtaaggctccgtcaaaaaaaaaaaaaaaaaaaattagctgggtgtggtggcatgcacctgtaatcccagctactcgggaagctgaggcaggagaattgcttgaacccgggaggcagaagttgcagtgagctgagatcatgccactgcactccagcctgggggacagagccaaactccatctcaaaaaaaaaaaaaaagagagaaaagcccaggcgcggtggcctacacctgtaatcctataatcccagcactttgggaggccgaggcgggcggattacctgaggccaccgtggctaccttggcccatccattggtgagaaggggtcacagccggagctcgcagggggcggagctcgcggagggcggggctcgcggggggcggggctcgcgggggcggggctcgagggggcggggctcgagggggcggggctcgcacagggcttgaatcccaggaggagggatcccagtgctcccggtggagtctgcctgccccaggtgtcctgttacatccctcaggggccgacagctgcccagttctgcttagggatccatgcgacacaggcagtttctcgcggaaaatgggtggatcccctgctccaacgagactgaaagcggcaggagcatggatgaacgttgcggtgttgccgttgcacatggctgccacctggccatgttctgggactcatgcttgtaaatccttttacatttcaaagccttagtgatgactcatcagtgggagaacacccggaacagggactggcaaatgattataaacggtcagagaggtggccgggtacagcggctcacatctggaggccgaggcaggaggatcacttgaggccaggagttcaaggccagactggacaacatagtgagaccccaatctctacagagtataaaaaaattaaccgggtgtggtggcatgcctgtagtcctatctactctggaatctaaggcaggaggatcgtttgagcctgcgaggtagaggctgcagtgagctatgatagcaccactgcattccagcctgggtgacagagcaggaccttgtctctaaaaaataaaaaaagattacgtatctattccaggggtcaggaaacaacatcctgtgggccagagccagatctggtctgcagaattattttttcattttattattattactagagactgggtgttgctctgtcacccaggctggagtgcagtggtgtgatcacaggtccttgcagcctcaacctcctggtctcaagcagtcctcccacctcagccttctgagtagctgggatcacagatacgtgccccaccatgcccagctaatttaatttttattttctgtcgacatggggtcttgctatgttgcccaggctggtctcaaactcctggactcaagcgattgtcctgccgcggcctcttaaggagatgggattggccgggcacggtggctcacgcctgtaatcccagcattttgggaggctgaggtgggcagatcacgagatcaggagattgagaccatcctggctaacatggtgaaaccccgtctctactaaaaatacaaaaaattagctgggcgtggtggcgggcgcctgtagtcccagctacttgggaggctgaggcaggagaatggcgtgaacctgggaggcggagcttgcagtgagccgagatcgcgccactggactccagcctgggtgacagagcaagactccgtctcaaaaaaaaaaaaaccaaaaaaacaaagataggattacaggcgtgagccactgcacccagccaggatttgaattttagtgtccataaagtgtgacgagaacatagttgtgtctaattctttacacgtggtcggctgctttagcgtgacaatgggagagtgaagggacacagtcctgactgccttgtgagcatgaaaatatttactgctgccagcacagtggctcacacctgtcatcccagcactttgggaggccaaggcaggtgggtcacttgaggccaggagtttgagaacagcctggccaatatggtgaaaccccatctctactagaaatacaaaaattagccaggtgtgatggcacacgcctgtggtcccagctacttgggagactgaggcatgagaatcacttgaacctgagaggcggagcttgtagtgagatcacgccactgcacagtgcacctgtggtcccagcactttgggaggctgaggagggaaggttgcctgaggccaggagttcaaaaccagcctgggcaatgtagcaagatcccctctccacaaaaaacagaaaaatgaggccgggtgcagtggctcacgcctgtaatcccagcactttgggaggccaaggcgggtggatcacctgaggtcaggagttcaaaaccagcctgggcaacataacaagattcccctctctacaaaaaaatagaaaagtgaggctgggtgaggtggctcatgcctgtaatcccagcactttgggaggccgaggtgggtggatcaactgaggtcaggagttcgagaccagcctggccaacatggcaaaaccccctctctactaaaaatataaaaattagccaggtgtggtgctgggcgcctgtaatcccagctattggggaggctgaggaaggagaatcgcttgaacctgggaggcagaggttgcagtgagcagagactgtgccactgcactccagccaggtcaacaagagtaagactccatctcaatagaaaagaaaggaaaggaaaggaaaggaagggaagggaaaggaagggaagggaaaggaagggaggaagggagaaagggaagggaagggagaaaggaaaatgagcatggcgtggtgacgtacacctgtggtcccagctatgggaggctgaggtgggaggatcacttaagcccggaaatttgaagttgcagtgagccgagatcgcaccacagcactccagtatgggcaacagagagactctctctctctttaaaaaagaaaaaataaaaatcaggggtggggtgtgaaggtcaggagcactttgggttttaggctgctggagggattttagtgtgtgtgtcgcagggatgatgtaatctgatggacacttcaaaggcacccttaacggctgtgaccagctcacagaggggcaggggagggaggaaagaggccagtccctccagacgggatgctggtgggctgtccagagccgtagctgcacagatggtgaggaatgactggattaggaatctcttttgaacactagccaacaggagttgttgatgagtgtgacagaaaaagagtctgtggtcacaaattctttgatgcacctcccttcgaaagctggcactcaggctgggcgcggtggctcacgccggtaatcccagcactttgggaggcccaggtgggaggatcgcgtgaggtcaggagtttgagaccagcttgggcagcataggaagactccctctctacaaaaaacttaattagctgggcatagtggcacacacgtggccctagctactaggaggcggaggtgggaggatcgcttgagcccaggaggtggaggctgcagtgagctgtgatcacaccattgcactccagcctgggcaacagagaaagaccctgtctcaaaaacaaacaaaaaaggaggcgggagggtgagaaagagagactggaagaggctgcactgtggctgtgaagggagaagaaggggccctgaggcttaagacgctggtaaagatgggaaacgtattctcccctggagcccccagaagggcccaggcctgcccacagctcgatggtgagccctgcaagatggatctcagacttctgactttcagaactgtgagataatcaatcagtattccatttttaaattctttgagacagggtctggctctgtcacccaggctggagtacagtggcacaatcacagctcactgcagcttccacctcctgggctcaagtgatcctcctgcctcagcctcctgagtggctaggattacaggcatgagccaccacatctggctaatttttgttcattttttgtggagatgggggtctcactatattgcccaggctggtctcaaactcctgggctcgagcaatcctctcacctcagcctcccacaatgctgggattacaggtgtgagccaccacgcctggccgaaaactcggtgtccctctaagcccccaagcgtggggtcctttgttacagcagctgtgggaacttcagacttactctttctagcaatggaccgcagcgacccacgggagtcctcatcctcacacagccgcccagccagcagtcacgttccaccttttttttttttttttgagatggcgtcttgctctgtcgccaggctggagtgcagtggcgtgatctcagctccctgcaacctccgcctcccgggttcaagcgattctcctgcctcagcctcccgagtagctgggattacaggcgcccaccaccacgcctgactaattttttgtatttttagtagagatggggtttcaccatgttggccaggctggtctcaaactcttgacctcaagtgattcacccaccttggcctcccaaagtgctgggattacaggcataagccaccgcatctggtcttttttttttttttttttggagtctcgctctgtcacccgggctggagtgcagtagcgtgatctcggttcactgcagcctccgcctcccgggttcaagcgattctcctgcctcagcctcctgggtagctggattacaggtgtgcaccaacatgcctggctaattttggatttttagtagagatggggtttctccatgttggccgggctgatctggaattcccgacctcaaatcgtcctcctgcctcagcctcccaaagtgctgggatgacaggcgtgagccaccgcgccccgccgtttttaagggtatagttgcaacccttgcttatgggaagagaagcaccttcagcctctgaccccgtgtttctgtcttgctgtgtggcatccagctcgctgtctgcgtgtctctgagccatggagcccactgtggctgacgtacacctcgtgcccaggacaaccaaggaagtccccgctctggatgccgcgtgctgtcgagcggccagcattggcgtggtggccaccagccttgtcgtcctcaccctgggagtccttttgggtaagtggctatgggattggctgggttcgcaatacaagggacatgtgcaaagtcaccgggaagtgacttgatggtgtctccttggccatctggaatcaaagggcagtgtctaggcgtggagatgaaggctgccctaggccaggcgggtgggcggggagtggagcagatgagttcctacgtgtgtcagttttcccgactaaagaagctcccgaaggaagttttcacagctggggtgacagagaaacagagacagggaaatgaccttgttttaaattttggcaaatcagcaaaatacccaaagtagtttttttttttgtttttttttttttttgagacggagtctctctctgtcgcccaggctggagtgcagtggtgtgatatctcggctcactgcaagctccacctcccgggttcacaccgttctcctgtgtcagcctccccgagtagctgggactacaggcgcccgccaccacccccggctaattttttgtatttttagtagagacggggtttcaccgtgttagccaggatggtctcgatctcctgacctcatgatccgcccgcctcagcctcccaaagtgctgggattacaggcatgagccaccgcgcccggccccaaaagtatttttataaaaccgagcaactgggttgggcgtggtggctcccgcctgtaatcccagcactttgggaggctgaggcgggaggaccatcggagcccaggagtttgagaacagcctaggcaacatgataaagccctgcctctacagaaaatacaaaaaattacccaggcgtggtggcacctgcagtcccagctactcaggaggctgaggcaggagaatcgcttgaacctgggaggcagaggttgcagtgagctgagatcgcaccactgcactccagcctgggtgacagagtgagactctatctcaaaaaataaaaacataataataaatttaaaataaggccgggtgcagtggctcatacctgtaatctcaactttttgggaggctgaagtgagcagatcatgaggtcaggagttcgagaccaccctgaccaacatggtgaaaccccatctctactaaaaatacaagaaagaaagaaagaaagaaagggagggagggagggagggaggcaggcaggcaggtaggcaggaaggaaggaagatagctgagcatggtggtgcacgcctgttatcccagctacttgggaggctgaggcaggagaattgcttgagcccaggaggaggcagagattgcagtgagccgagatcatgcccttgcagtccagcctgggcaacagagcaattccatctcaaaaaaaaaaaaaaaaaaaaaagttaattttaacatttaaatgatgataataaacagcaatttggggagaaatgctctcgtgtggcaaaatagtaagttcgcgatcctatgagaatcctcctaggtttttttttttcttttttcttttttttaaaaaatatttgtggaacttctggaaactcccagagccagacatgtttgactgaggccctctagtggctgtaggtaccaagtacaatacaatttgggttcctcgtgtgagtgtatttgtgtgttcatgagtgtgtgcatggtgcacacgtgttcatttgcatgcgtttgtgcatgcatgtgtgtgtctgcgtgtgtatctatgtgtgcatgcgtgtgtgtgtgtgtgtgtccatcacctagtgagaggcaggggcggggcagagtttctcatctgcattgtaacaaatacattttgggaaaaacagataaatataattcccatcaggacccccctgaaaggaaaggaagtctttttttttttttttgagatggagtctcactctgtctcccaggcgcgacagagtgcagtggcacaatctcagctcatcacaacctccaccacccaggttcaagcgattctcctgcctcagcctcctgggtagctgagattacaggtgtgtgccactacgccgagctaatttttgtatttttagtagagatagggttttgccatattggccaggatggtctcaaactgctgacctcaagtgatccacctgccttggcctccgaaagtgctgggattacagacatgagccaccacgccccatcaggaagtctttcaagaagcacttaaggccaagtgtggtggctcctgcctgtaatcccagcactctgggaggctgaggcaggaggattgcttgagctcaggagttcgagaccaacctaggcaacatagcaagaccccatctctacaaaaaattaaataatgaagacaagaaacatttaaaattaaaattttataatgttttcagtgaaaatgagtggttgtgcgtgccagtagtccctgctactcgggagactgaggtgggaggattgcttgagcccaggagttggagcctgcagtgagctatgatcacaccactgcactccagcttgggagacagagtgacaccctgataaaaaataaaaaagaaaaagaaaaaaggacatgatgccaggcgtagtggctcacgccagtaatcccagctctctgggacgctgaaacgggaggattgcttgagcccaggagttccagttcagcctggtaacatggtgaaaccctgtctctacaaaaaatgcagaaaattagccagggccgggcgaagccagctgggctcctgagtcgagtggggacttgaagaattgttatgtctagctggaggattgtatatgcaccagtgaacactctgtgtctagctaatctggtggggacttggataacttttatgtctaactagaggattgtaaatgcaccaataagcactctgtgtctagctcaaggtttataaacacaccaatcagtgctctgtgtctagctaatctagtggggacttggagaaattttaagtctagctaaaggtttgtaaatgcaccaatgagcaccctgtgtctagctcaaggtttgcaaatgcaccaatcgcaccaatcagtgttctgtgtctagctaatctagtggggacttggagaacttttgtgtctagctaaagatttgtaaatgcaccaatcagcaccctgcgtctagctcagggattgtaaacacaccaatcagcaccctgtcaaaacggaccagtcagctctctgtaaaatggaccaatcagcgctctgtaaaatgggccaatcaggaggatgtgggtggggccagataagggaataaaagcggactgctggagccagcagcggcaaccggcttggggaccttttcacagtgtagaggatttgttttttaattctctgcgagaaatcttgctgctgctcactcgttgggtgtgagatgcttttatgagctgtaacactcactgtgaaggtctgcagtttcactcctgaggccagcaaaaccacaaacccaccaggaggaatgaacaactccagacacgctgccttaagagctgcaacactccctgggaaggtctacagcgtcactcctgaagcaagcaagaccacgaacccaccagaaggaagaaattccgaacacatccgaacatcagcaagaacaaactccggacacaccatctttaagaaatgtaacactcagcgtgaggatccgcagcttcattcttgaagtcagtgagaccaagaacccacgaatttcggacacagtaacatggggaaaccctgtctctacaaaagaatgcaaacaattagccagggccaggcatagtagctcaccccggtaatcccagcactttgggaggctgaggcaggtagatcatgaggtcaggagtttgagaccagcctggccaacatgggtgaaaccctgtctttactaaaatacaaaaattagctgggcagactggtacgcgcctgtaatcccagctactcaggaggctgaggttggagaattgcttgaacccgggaagtggaggttgcagtgagccgagatcatgccactgcactccaacctgggcaacaaagggagaccatgtctccaaaaaaaaaaaaaaaaaaaaaaagctgggcgcggtggctcccacctgtaatcccagcactctgggaggccgggttgggcggatcatgaggtcaggagattgaaaccatcctggccaacatgatgaaaccccgtctctactaaaatacaaaaaacattagttggtcatggtggcatgtgcctgtagtcctagctactcgggaagctaaggcaagggaatcgcttggacccaggaggcagaggttgcactgagccaagatcgtgccactgcatcccagcctggcaacagagtgtgagactgtgtcaagaaaagagaaggaaagagaaagctagccagccaggcgtgatagtgggcgcctgtggtctctgtggtctagctacttgggaggctaaggcaggaggatcacctgagcccatgaggtcgaggctgcagtgagcagtgattgtgccactgcactgaagcccgaacaatagagaccttgtctcaaaaaaataaaacatttaaaaaaataaaaatgagaattcagcccttcgcaaacagctcaccattttagttggagatgagaggctgagtggagagcgggaggcgttctgaactatttctgcaacttcctgaatctgcagttgtttagagtagaaacagagtgaggttgggacacagaggcggggcaattcagtccgcccaccagggtgctcgtgtttctttagtttcttgaacgagaaaacataccgtttttagaattggttcagaatattctatctactgaatatatggctacgtaaatacccatctagcatatctatccatttaggataaacggaattgggacccagctttcacggtttacgcggttgctatttgcatggtttaaatgttgtaattacggccattttttttgcgctggtgtgcacttctggtagttttaacgtatttttgaccaaaactcgtgctctcatggtttctgtggttgctctcgtagtttttatttagatttttttctgctgctgcttgcatcagcataggaattttttatgactattatttttgctgtactttgtactttggacacaacacagccaacagctaaaaaccagtgctttctgcctggcgtggtggctcacgcctgtcatcccggcactttggcaggctgaggcgggcagatcacctgaggtcaggagttcccgaccagcctggccaatgtggcgaaaccccatctctgctaaaaatacaaaaattaacgctgggtgcagtggctcacgcctgtaatctcagcacttcgggaggccaaggcgggtggatcacctgaggtcaggagttccagagcagcctggccaacatggtgaaatccagtctgtactaaaaatacaaaaaaactagccaggtgtggtggtccacgcctgtaatcccagctactcagcaggttgaggcaggaggctgaggcaggaggatcgcttgaacccgggagatggaggttgcagcgagctgagaaaacaccactgcactccagcctgggtgacagagtgagaccctatctcaaaacaaacaaggccgggcgcggtggctcatgcctgttaatcccagtgctttgggaagccaaggctggcggatcatctgaggtcgggagtttgagaccagcctggccaacatggagaaaccccatctgtactagctgggtatggtggtgcatgcctgtaatctcagctactccggaggctgaggcggcaggagaattgcttgaacccgggaggcggaggttacagtgaggcgagatcatgccattgcactccagtgtgggcaacaagagcaaaactctgtctcaaaacaaacaggccgggtgtggtggctcacgcctgtaatctgagcactttgggaggccgaggagggcggatcacgaggtcaggagatagagaccatcctggctaacacagtgaaatcccgtctctactaaaaatacaaaaaaattagccacgcgtggtcgtgggtgcctgtagtcccagctactcgggaggctgaggcaggagaatggcatgaacccgggaggcgcagcttgcagtgagccgagattgcgccaccgcactccagcctgggcgacagagcgagactctgtctcaaacaaacaaacacaaaccaaccagtggtttttgaagatgacctcatgggactgtggccggagagtcctgatggcctctggctgtgctcatgcccctgccataggaggcggggactgtcatttcaccgtctcctgatgccattccagaggttacgccctgaagtcagctcagatcctgggccaggcactgcatgggagacaggcatgagcaggacctctttctgccttcgaggaaaacacgggggcatctggggctcacttggcactcatccaccttgtgctgtacctggggacctccgggtgggtggctgtcatagaattcggctccaaaccaggatgcttttgggaattgagggagagccctgtgagtagctattcagggctatcacgggggcgtcgaccaccccactgcgtgtcaggagtgaccaccagggtgtgtgagtgcaaacagggcggggcctgggtggcagctcagcggagccctgagcccccaaaggtgggctctctcacgggccctggtctcgtccccagccttcctctctacacagggcttccacgtggaccacacggccgagctgcggggaatccggtggaccagcagtttgcggcgggagacctcggactatcaccgcacgctgacgcccaccctggaggcactggtgagggtggtctgtgtttgggggccagggaggaagagcgggtggccgggggctttgacctggaggtgctttccgtgtgggagggaggcaggccacaggcaacgaagctgaggtggaggctgtgagaccgggaggccaggccagggggcgggcaggacgaggccaggtggccaaggcagatacctgcaaggcagagctgtatccactgaggacacactcacatgggactttaggccacatttagaggtttttttttttttcttttttttcttgagacggagtctcactctgtcacccaggctggggtgcagtggaatgatctcggctcactgcaagctccgctgctcaggttcaagcgattctcctgcctcagcctcccgagtagctgggattacaggtgcacgccaccacgtccagctgatttttgtatttttagtagagacggggtttcaccatgtaggacaggatggtcttgaactcctgacctcaaatgatcttccctccacggcctcccaaagtgctgggattacaggcgtgagtcaccgtacccaacctgccacatttagagttttacattttattctaaaggggaatcagagccctcatgcacagctgggggaaggtattttattttatttttttgagacggagtcttgctctgttgtccaggctggagtgcagtggcaggatcatggctcactgcaacctctgcctcccgggttcaagcgattctcctgtctcagcctcctgagtagccagggttacaggcacccaccacctaggatgaacagggaaacacagcgtggctatgcacacactggaatatgactcagccaggaaaaggggccaggcttggacacaggacacagcgaattatattttaatgaaaaaataatgttttccattttattcgaagagaaacagacgtgtgaccacatcagcaatcacgtattaaaaacagcactccaggcgggcacggtgggtggctcacatctgtaatcccagcactttgggaggccgaggagagtggatacctgaggtcaggagttttgagaccagcctgagcaacatgacaaaatcccaccattagtaaaaacacaaaaattagcggggcgtggtggtgtgtgcctgtagtctcagctactcgggaggctgaggtgggaggattgcctgagcccaggaggcagaagttgcagtgagccaagatcgtgccattgcactccagcctgggtgaccgagtgagactccatcttaaaaaacaatttttaaaaataggctgggcgtggtggctcacgcctgtgacgcctcctgggctcaagcaatcctcccacctcagcctcccgagtagctgggagtgcaggcacacaccaccatgcccagctaatttgggaggctgaggtgggcggatcacgaggtcaggagttcaagaccagcctggccaacatagtgaaaccctgtccctactaaaaaatacaaaaaattagccacgcatggtggtgtgtgcctgtaatcccagctacttgggaggctgaggcaggagaattgcttgaacctgagagacggaagttgcaatgagccgagatcgtgccactgcactccaccccaggcgacagagcaagactctgtctcaaaataataataataataaaaaatttaaaaataaaacataagtctgggcgtggtggctcacaactgtaatcctagcactgtggaaaaccaaggcaggtggatcacaaggtcaggagttcgagaccagcctggccaacatagtgaaaccccatttctactaaaaatacaaaaaattagttgggcatggtggcgggcacctgtaatcccagcttcttgggaggctgaggcagcagaatcgcttgaacctgggaggcggaggttgcagtgagtggagaatgcactactgcactccagcctgggtgacagagcaagactctgtctcacaatacatacatacatacatacgtacatatagataaaaatttaaaataataaaaggaaatgctttcccatggaaccaaccccttctccagctccctccaacacctgacaggcctctgcagtgccagggtgcccatgctgtgggtctcaacatttgatattcttgtttctattgcagtttgtaagtagttttcagaagacagagttagaggcaagctgcgtgggttgctcggtactgaattataggtgagttggagcttccattgggtgaaggaaacttggtggacatctgggagtttctggaggagtccagaaaagtttggaagattctagaagattccagaagattccagcagggcggagcccctccctctccaagggcctctcctccatacctgtagggatgggaactccagtgtcctcgtacatttccagctgcactttctgctgcgacccctccagacgctgagcctgggcctggaggaggagctattgcagcgagggatccgggcaaggctgcgggagcacggcatctccctggctgcctatggcacaattgtgtcggctgagctcacaggtgagtgggcagccgagaccgaaaccccatcacgaggaggctggagtggggcaggagctgcaagatacattttgataaccaccccttcccataaaaagaaaacaaactggccgggtgtggtggctcatgcctgcaaccccagcattttgggaggccgaggcgggtggatcacctgaggtcaggagtttgagaccagcctggccaacaccccatctgtactaaaaatacaaaaatcagttgggcgtggtggtgtgcacctgtaatcctacctacacaggaggctgaggcaggagaactgcttcaacctgggaggcggaggttgcagtgagccgagatcgtgccattgcactccagcctgggcaaaaagagtgaaacttcgtttcaaaaacaaacaaacaaacaaatgtaaaaactgacattgcctttgccttaatggtgtggataaggggtcagccatcttgttctgtaaagagccagagtgttgtgttgtgttgtgttgtcttgtcttgtcttctcttttcttttccattttttttatttttgagacaggatctcactctgttgcccagtctggagtgcaataatgaagtcttggctcactgcagcttctgcctcccaggttcaagcaattttcctgcctcagtagctcccgactcactcccgagtagctgggattacaggcacgcaccaccacgcctggctaatttttgtatttttagtgagatggggtttcaccatgtgtactgggctggtcttggactcctgacctcaggtgatcctcctgccttggcctcccaaagtgctgggattataggtgtgagccacgtgcccagttaatattttcatctttgtggtccgttgggtttctgtgacaagcactcagctctgttatttgtagcacaaaagtagccacagacaatacataaatgaataggtgtggctgtttaccaataaaacttattaaaaataacaagcagtgggctggatttggcctatggccgtagttggccaaccccctactgtagaatcaaggataaatgctacactctaataaaattgtatggaaggccgggtgtggtggcttatgcctgtaattccagcaatttgggaggccaaggtgggctgatcacttcagatcaggagttcgagaccagcctggccaacatggcgaaaccccgtctctactaaaaatacaaaaatgagctgggtgtggtggcacgtgcctgtaatcccagctgctcaggaggctgaggcaggagaattgctggaacccaggaggcggaggttgcagtgagccaaggttgcactactgcactccagcctgggtgacagagtgagactccatctcaaaaaaaaattaataaaaataaaaaataaaattatacagtgcatgattttgtatgcacctggttttaaaaaataaaaaacaaaattgtacggtgcagcaggtcatgattggagagtcagatgcaagttcagaccattgttaaagatttgttgccaggtgtggtggctcatgcctgtaatcccagcactttgggaggccgaggtgggtggatcacctgaggtcaggagtttgagaccagccgggccaacacggtgaaaccccatctctactaaaaataaaaaaattagccgggcatggtggcgggcgcctataatcccagctacttgggaggctgaggcaggagaattgcttaaacctggtggaggtggaggttgcagtgagccaagatagcaccactgcactgtagcctgggtaacagagtgagactctgtcttaaaaaaaaaaaaaaaatggccgggcgcggtggcttacgcctgtaatcccagcactttaggaggccgaggtgggcagatcacaaggtcaggagatcgagaccatcctggctaacacggtgaaaccccgtctctactaaaaatacaaaaaatcagccgggcgtggtggcgggcgcctgtagtcccagctgcttgggacgctgaggcaggagaatagcgtgaacccgggaggcggagcttgaagtgagccgagatcgcgccactgctctccagcctgggcgacagagggagactccgtctcaaaaaaaaaaagtcaccttgaccttgacatgcaggacatttatggttccctccccaccaaccgtcacatgctggtcgaggtcttaataacctctgctccagcgttcacagaacttcccttggtgatagggaggttccaggccttgtgcagtttggtggccgtccgagccctggggctggtgagtgctccccgtggggcaagtgagactgaggatcggtgttgaagtagatttcatcctcgctgattgaaggcagaatttaagtgacgccagggtggacaaggcagctgctcactttactccatgacctgcctgcaataggacgttttctttctttcttttttctttttttttgagatggagtctcgctctgtcgcccaggctggagtacaatggtgtgatctcggctcactgcaacctctgcctcccgggttcaagcgattgtcctgcctcagcctcccgagtagctgggattacaggcgcccggcaccacacccgtctaatttttgtatttttagtagagacagggtttcaccatgttggccaggctggtctgtaactcctgaccgcaaatgatccacccgcctcagcctcccaaagtgctgggattacaggtgtgagccaccgcgcccggccaataggatgtgttcaaagggttttaccgcttattcagtgagcttctatcttctctgttttgttgcagggagacataagggacccttggcagaaagagacttcaaatcaggtatgtttttctctctggccttttctctgattgcagttactgacagaggtttcctaagactcatttcaaggaagtgaaggaatccctggaacgaggctgggcgcggtggctcacatctgtcgtcccagcacttcaggaggctgaggcaggaggatcacttgaggccaggagtttgagaccaggctggacaacagagcgagaccctatctctacaaaaataataataaaaaaaggccaaaaataatttttaaaattattataaaaaataataaaaattagccgggcatagtggcgtattgcctgtactctcagctacttgggaggctgaggaaggaggatcgcttgaacccaggaggcagaggctgcggtgagctgagatcacgccactgcactccagcctgggtgacagagtgaaactgtgtctcaaaaaataatacataaggccgggcgcactggctcatgcctgtaatcccagcactttgggaggccgaggtgggtggatcacctgaggtcaggagttcgagaccagcctgaccaacatggagaaaccccatctcactaaaaatacaaaattagccaggcgtggtggggcgtgcctgtaatcccagctactcaggaggctgaggcatgagaatcacttcaaccagggaggcggaggttgcggtgagccgcgattgtgccattgcactccaggctgggcaacaagagtgaaactctgtctcaaaaaaataaataaataaaataaaataaaaataaataaaataaatagcctgggttggtggtgtgcacctgtggtcccaactactcaggaggctgaggcaggaggattgcttgaacctggagttagaggctgcggtgagctgtgattgcaccactgcactcccgtttgggtaacagagctagaccctgtctcaaaaacaaaaataaaaacaaggaaaaggaaagaaaaggagagagagagtttccacatttccgtaccctggtggtactaagtatagcatggtgccttactccaaccaggagatgtagcatgaggtcagaaagtcggttcttttctgtcctcaggccgctgtccagggaactccttttcctgcgggaacagccagtgtgtgaccaaggtgaacccggagtgtgacgaccaggaggactgctccgatgggtccgacgaggcgcactgcggtcagtctgcctgtctggcctggtctctgggccccttcccttttccagggtcagctgctggctctggtctgtggtcactgtgcttatttcactgggcacacaggcctggcatttatgggggctgggcagagaaaagaaaggggcacccatggtatggggagaaacatgagcaaacagcagagtaaaggaaaagtgcaggtgtgtgatgggaagaagcctggggagaggagggagaagatatcaggctgaaaacagaggttgtggccacagcctgggaagtgttgaataccaggaactggagctctgtcctataagcagtggggcgtggccacagggatgtgagcaacggaaagagacaattaaaatgccgtaagagattagcagggtgcggtggctcacacctgtcatcccagcactttgggaggccaaggcaggaggatcacttgaggccaggagtttcagaccagcctggacaatatagtgagaccccatctctactaaaaaaaaaaaaaaattggccaggcacggtggctcacacctgtaatcccagcactttgggaggctgaggcaggtagatcacgaggtcaggagatcgagaccatcgtggctaacacggtgaaaccccctctctactaaaaatacaaaaaattagccgggcgtggtggcgggcgcctgtagtcccagctatttgggaggctgaggcaggagaatggcgtgaacccgggaggtggagcttgcagtgagccaagatcacgccactgcactccagcctggcaacagagcgagactctgtctcaaaaaaaaaaaaaaaaaagaaaaaaaaattagccagcgtggtggtgggcgcctgtggccccagctactcaggaggctgaggtggaaggattgcttgagcccagtagattgaggctgcagtgagctatgattgcactactgcactgtccagcctggataatagagtgagaccttgtctcaaaaataaataaaatgctggaagagtagccaatgtttctataaaaatactagcccatgcaataaggtaaggacagcagtttaagtattgaaaaggaagaggaaaatcttaattcatttgaaatcattgtctgtctaaaataaatcaatatccaaacagaaggagagaagctgaaagagtaaaataaaatgaatcaagaaattgactaaaaagctatttagaataaaggctgggtgcagtgggtcacgcctgtaatcccagcactttgggaggctgaggcaggagaatcccttgaacctgggaggtggaggttacagtgagccaagatcacgccactgtactccagcctgagctacagagcaaaactctgtctcaaaaaaaaaaaagctgtcattttgctttatacagtaataataagatagaagatacaaaggaaaaaatatctttcatgatcagtagtgacaaaaaatatcaagactaggcctgatgccgtggctcaggcctgtaatcccagcactttgggacgccgaggcaggcagatcacttgatgtcaggagttcgagaccagcctggtcaatttggtgaaaccccggctctactaaaagtacaaaaaattagccaggtgtggtggcgggtgcctgtaatcccagctactcaggaggctgaggtaggagaatcccttgaacccgggaggcagagcttgcagtgagttgagatcacgccactgcactccagcctggacaacagagcgagactccatctcaaaaaaaaaaaaaaaaaatcaaagactaaacttacaaacgtgccatgcctgtgatgataattattatatataattatagaattacaaaattttgtgaaggacataaaagtagactaaataagcagacagacacaatatcctatacaaacatgtacgtggggtcatcgccccttacccacagctaagatagagacctttctctgccactcactggtgcacgtgaccttgaatgcttgacctacgtgccaggatggggcagccgaggagttgaagaggaagggatggggagaccccagaagagtcagggaagccaaggaggggcccccaagcatctctttgaacttagggactgtagacgagagactcagagatgcatgttctgggagttcagggtgaggtcctgccttcgtggggtcatggctggtgacctgctgtcttgcagagtgtggcttgcagcctgcctggaggatggccggcaggatcgtgggcggcatggaagcatccccgggggagtttccgtggcaagccagccttcgagagaacaaggagcacttctgtggggccgccatcatcaacgccaggtggctggtgtctgctgctcactgcttcaatgagtaagcccccatcccaaagcaccaaacccgaaccctctgtatttctcctgccttccctcgtgcactggggacgtcacttctggtttccttagagcccctggaagtaattttttcttttcctttctttcttgcttttgctgttgttgaatctgagggcattctttttttttttttttttgagacagaatctcgctctgttgtccaggctggagtgcagtgacgcgatcttggctcactgcaagctccgcctcctgggttcacgccattctcctgcctcagcctcccgagtagctgggactacaggcgcccgccaccacgcctgttgtatttttagtagagacggggtttcaccgtgttagccaggatggtctcaatctcctgaccttgtgatctgcctgccttggcctcccaaagtgctgggattacaggtgtgagccatcgtgcccggcctcttttctttctttctttcttttttttttttttgagatggagtctcgctctgtcacccaggctggagtgcagtggcgtgatctcggctcactgcaagctccgcctcccgggttcacgccattctcctgcctcagcctcccgagtagctgggaatacaggcgcccgccaccacgcccagctaatttaatttttttttgtatttttagtagagtcggggtttcaccatgttagtcaggatggtctcgatctcctgacctcgtgatccgcccacctcggcctcccaaagcgctgggattacaggcgtgagccactgcgcccggcctctttattttattttattttttcttttgagacagagtctcagtctgtcgccctggctggagtgcagtggtgcgatctcagctcactgcaacctccacctcctgggataaagcaattctcttgcctcagcctcccaagtagctgggactacaggtgcacgccaccatgcctggctaatttttttttttttgtataattagtagagatgggttttcgccatgttggccaggctggtctcgaactcctgtcctcaggtgatccgcccacctcagcctcccaaagtgctgggattacaggcgtgagccaccgtgcctggcccacttgctgttcttttgagagtagccatgccagtgggtgtgaagtagcatctccctgtggttttgacttggatttctcggtgaccaatgacattttgttgatgttttgctcattgtggacattttttgcattcactttgattttttaaaatattctgtcgtgatattatcctttttttttttttgagacagagtctcactctgtcgccctgctggagtacagtggtgcagttttggctctctgtaagctccacctcccgggatcaagcgattctcctgcctcagcctcccgagtagctgggattacaggcacccgccaccatggctggctaatttttgtatttttagtagagacgtggttttgccatgttggccaggctggtcttgaactcctggcctcaagtgatctgcccgtctctgcctcccaaagtgctgggattacatgtgtgagccactgcacccggctcgatatcatttatcttgatggctgagatttttggcaactctttaaattttgtgcccaaggctcatggctggctcccctcaccctaatcccaactctgtctcatcctgtctttgtttaaaatgttgatacttggacaggctatagtgagcttgtggctcatgagtgtaatcccagcactttgggaggctgaggtggggggatcacttgaggtcaggagtttgagaccagcctggccaacatggtgaaagcttgtctctactaaaaacacacaaaaaaattagtcgggcatagggggcgcaaacctgtcatcccagttacttgggaggctgaggcacgaggatcacttgaacccgggaggtggaagttgcagtgagctgagatcacgccactgcactccagtctgggagacagagcgagactctgtctcaaaaaaacaaaacaaaacaaaaatgttgatacttcatgcatcatgcattctcctgcacctgtgatttttttcttttcttttctttttttttttttttttttttgagacaggttacctgttgcccaggctggagtgcagtggcgcagtgatagctcactatagctcatgacagcctcaacctcccaggctcaggcaatcctcctacctcagcctcctgaggagctgaaaccacaggtgcacatcgccacaccccgctaatatatatatattttttctgagacagagtcttgctctgtcgcccaggctggagtgcagtggcacaatatcagctcactgcaacctccacctcccgggttcaagcaattctctgcctcagcctcctgagtggctgggattacaggcgcccatcactatgcccggctaatttttgtatttttagtagagatggggtttcaccatcttggccaggctggtcttgaattcctgccttcgtgatcctcccgcctcagcctcccaaagtgctgggattacaggcatgagccaccgcacctggcctgttttttgttgttgtttttaaagactgtgtttcgctatgttgcccaggctcgtcttgaactcctgggctcaggtgatcctcccgcttcagcctccaaaagtgtgggattacaggcatgagccactgtgtctggcctgatttttataaatactattcataaatattaatgtggggggataccccttacattttgcacccaaggcgagtgtcccgtctgcctcccccgacggctctgaccctcggtggcttctgagctggggtttgctcctgcaggttccaagacccgacgaagtgggtggcctacgtgggtgcgacctacctcagcggctcggaggccagcaccgtgcgggcccaggtggtccagatcgtcaagcaccccctgtacaacgcggacacggccgactttgacgtggctgtgctggagctgaccagccctctgcctttcggccggcacatccagcccgtgtgcctcccggctgccacacacatcttcccacccagcaagaagtgcctgatctcaggctggggctacctcaaggaggacttccgtaagcatcttcctcggcctgcaagtgagctcaggcaggcaggcgggcaaataacgcagaaaagggccaggtgaggtggctcacgcctgtcatcccagcactttgggaggccgaggcgggtggatcacgaggtcaggcgtttgagaccagcctggccaacatagtgaaaacccgtctctactaaaaaatacacacacacacacacaaaattagccaggcatggtggtgcgtgcctataattccagctactcaggaggctaaggcaggagaattgcttgaacccaggagatggaggttgcactgagccaagatcgcaccactggactccagcctgggtgacagtgggaggctccatctcaaaataataataataataataataataataataataataataatgatgatgcagaaaaacacagtgggtctgcattattctctgattctgtattcacgaattccactgcttgctaagatatatttataacccatcatcgatgctactgcgattttttttttttttttttgagatggagttttgctcttgttgcccaggctggagtgcagtggtgcgatctctgctcactgcagcctccgcctccgggttcaagcgattctcttgcctcagcctctgagtagctgggactataggcatgcaccaccacacccggcaactttatttttgtattttttagtagagacaaagtttcaccgtgttggccgggctggtcttgatctcctgacctcgtgatcttcctgcctcagcttcccaaagtgttgggattacaggtgtgagccacctcacccggccaaaaaaattgatcttaatgtactaaaatgcacatctaaatagtcacctgtggccagtggctactatattgggtggtgtagttccagggggttgtcaatcagccacaagatgactgacagagggaaatgaatccagtggagaaaaataaggtgggggtggcagctgcagctttaaatagggaggtcaggagatgcctcctggagagaggagatgaaggagcaagtcaggcaaattctgcagggacaagcatttcagacagcgggaacagcatgtgcaaaggccctggggtgggaggacagcagggcaggggttgatgtgactgatttaatatttagcaagggtggtgctggctgccgggttgggaatggatttcagtggggtgggaccagagtaagagaagtgagtggggaacagctataatgacccgggcaaggatgggcgtgagacaggggctgattctgtgtatatttgggggctgacctgaggccaacttggaatttgaggactgtggacctggaatgaggggcctgagatccctgagatggggaatgctgaggggtggagcttgcggaagggagatgaggacctcgggctgggggtgttaagtctgatgcctcttccttgtccaggcagagagtgttaccaggtggggtgtttaccttttgtagtttcagagccatgtgttgtaggtggccatgcttggagctggggaaactgagggaggcttggagaggagctgtccttcagcctcccagctcaaagtggctgccagggctccggcactctcaccctgcttttctctccccattcggccagtggtcaagccagaggtgctgcagaaagccactgtggagctgctggaccaggcactgtgtgccagcttgtacggccattcactcactgacaggatggtgtgcgctggctacctggacgggaaggtggactcctgccaggtgagcccccgatgccccagaccccagaaaaacacagaaatagacacgagcatgttcaaatgctgagcaattcacagatatctggatgcccgctgtgagcccccaacgccccagaccccagaaaaacacagacacgagcgtgttcaaatgctgggcgattcacagatatctggatgcccgttcttgaggaattttaaagcagttgggattgagaggcaggtgctgcttagaggatcttccagaagctctaacctgacttcaatccctcctctgccctccatggctccctgctcccttccagtgggccccaggtgcgtgccacagagcctggggtccctgagtaatctccctggctatgatggggtccctgtgtaaatcccccccagctgccctccaaaccgggacttgtgtggggacacagacactgttcccagcactgggcctgatacaacgtggcacccaagaaacacctcttgtatgaatgatgccagcacataccctgggcatcagattctctccgtctgtatgggaagggttggtctatgggaaccccgtggacttttgcccctgggtggtcagctgggccatgagtgagctgcaggctcaactcaagaaggttccagggctgggcacggtggctcacgcctgtaatcccagcactatgcgaggccaaggcgggtggatcacttgaggtcaggagtttgagaccagcctgagcaacatggcgaaaccttgtctctactaaaaatacaaaaattagcctggcgtggtggcaggtgcctgtaatcccagctcctcgggtggctgaggcaggagaatcatctgaacctgggagctggaggttgcagtgagctgagatcacgccattgcactccagcctgggcgacaaagcaagactctgtctcaaaaaaaaaaaaaaaaaaaaaaaaaaaaaaaaaagagaaaatcaggggtcatccaaagctgcttctgctgtatacctggaaccttctttttcttcttcttctttttttttttttttgagatggagtctcactctgtcacccaggctggagtgcagtggtgtgatctcagctcactgcaacctccgcctcccaggttcaagcgagtctcctgcctcagcctccagagtagctgtgattataggcatgcgccaccacacctagctaatttttgtatttttaattaagacactgtctcgctctgtcacccaggctggagtgcagtggcaccatcttggctcacctcccagtttcaagtggttctcatgcctcagcctcccgagtagctggaataacaggtgcccaccaccacgcctggataatttttatacttttagtaaagacagggtttcgccatgttggccaggctggtctcgaaatcctggcttcaggtgatctgcccaccttgtcctcccaaagtgctaggattacaggtgtgagccaccaggcccggccgacaattataatttttgttttcaaggtgtctcattctttcttctttcagccacctggtcttgtttgcagtgtcctgttcttgtttcgtggataccatttctttctttttctctgaggatcgtaatttaatccgttatgtttcttctatattctatatttgtggttaactgtatttcaggcaaacgtaagttattctgttgtaactgagtgtctttatttcatggagattggaatccctcaactggtgcttaagaatgaaaagctgggtgcagtggctcacacctgtaatcccagtactttgggaggctgaggcagccaggtcgcttgaggccaggagtttgagaccagttagggcaacatagcaaaacttttgtctctacaaaaacaaaaacaaaaacaaaaattagctgggtttggtggtgcatgcctgtagtcccagctacttgagaggctgaggtgggaggattatttgagcccaggaggtggaggttgcagtaagccaagatcacgccactgtactctagcctgagtgacagagtgagacgccgtctcaaacaaaattgaaaatttaaaaatgtcgctcaattcttgccgtgatcttatatttgctattcactttctcttggcgagggacattaacagtttgtgttcttggattctatgtaccctttcaagggaccaaagacctcctggtctcatttatcctttgtggttgcccaaatcccttttctaccccaaccaacccaggtcctcttgagaaagctttctcttgtgtcttgagcttctgcacatgggctgggctgccacttcctctgtcagcctctcgtgagtcttcatggtttctggtccacaaccagggatctctcctgcctaatttttttagcatggctgtggattcctgtctttcttgtgcatacctttgctcttgtttctaaggcctggtgggtgaggaaaagatgggagagactgctacatgtgcttagattgccatattgaaaccagaatctggagaaaatgctaggaactaatgagagggctcatgtttaagaatgtaagagtcggccaggcacggtggctcacgcctgtcatcccagcactttgggaggctgaggtgggcagatcacttaaggtcaggagttcaagaccagcctggccaacatggtgaaaccccgtctctactaaaaatacaagaaattagccgggcgtggtgatgcgtgcctataatcacagctacttgggaggctgaggcaggagaattgcttgaacctgggaggaggaggttgcagtgagccgagatcacgccattgcactccagcctgggcaacagagcaaaactctatctcaaaaacaaaaacaaacaaaaaaacgatacacagaacgtaagggtcagggtgaactggatatgggaaggtaaaaaatggtgaggccggacgagtgacagcagatgagcactttgggagcaatgctgcagctaccagtgagatatatggaggcacccgcgtggcagccatactgccagcctaagcaagtggtgacattatcaaagatctactgagttaagaagaggaggggatgttatttatttgggtcacgttttggcctgccagaggtaggactgaaagacatcttagagatcctatagtccaactgtcttgggttttgttttttttcctccacagaagaggaaacaggttctgagatgtcaatgatcagccccaggtgctctgtgagcttgtgtggagagaggtcctggctgtcccagctcagagctccttcttgggcctcgtagcactggtgtctggactggctgctgccgacccatcctgagggtgtgtgttggtttcctagggtgactcaggaggacccctggtctgcgaggagccctctggccggttctttctggctggcatcgtgagctggggaatcgggtgtgcggaagcccggcgtccaggggtctatgcccgagtcaccaggctacgtgactggatcctggaggccaccaccaaagccagcatgcctctggcccccaccatggctcctgcccctgccgcccccagcacagcctggcccaccagtcctgagagccctgtggtcagcacccccaccaaatcgatgcaggccctcagtaccgtgcctcttgactgggtcaccgttcctaagctacaaggtattttcggggcagaaaggtagaagatgatgtacgtgcctatcttgatttagggagaacggatatcgtcatagtatcttcataattttggatcttcctgttcaaggaaaggtcacatgtgtatccgtttattcccatcttacgttgcgtgtaccctcatggtatctttctgtccacaggtcttgcccatgtcttgttaactatggcgatctatcaatgggatacttttttttttttttgagacgcagtcttgctccgtcgcccaggctggagtgcagtggcgtgatctcggctcactgcaacctccgcctcccaggttcaagtgattctcctgcctcagcctcctgaacagccgggattacaggcacaggccaccacacccggctaatttttgtatttttagtagagacggggtttccccatgttggtcaggctggcctcgaactcctgacttcatcatctgcccacctcagcctcccaaaatgctgggatgacaggtgtgagccaccatgcccggtctggaatactttctattgtattttcaaatagtttgtacccagacaacttgtaggactggcagggtgcggtggctcgtgcctgtcatcgcacactttgggaggcagaggtgggcagatcgcttgaggtcaggagttcaagaccagcctggccaacatggcaaaaccccatctatactaaaaattagctgggcatggtggagggcacctgtaatcccagctacttgggaggctgaggcaggagaatcgcttgaacccaggaagcggaggttgcagtgagctgatacggtgacatggtgccactgcactccagcccgggcaacaagagcacaactccatctcgaaaaagaaaaaagaaaacttgtaggactatatctctgtttccaaaaactgttagttgcattcctatttttttttttttttttttctgagacggagtttcactcttgtcgcccaggctggagtgcagtggtgtgatctcggctcactgcaacctccacctcccggttcaagtgattctcctgcctcagcctcctgaatagctgggattacaggtgcccatcaccatgcttggctaatttttgtatttttagtagagttggggtttcgccatgttggccaggctggtctcgaactcctgacctcaggtgatctgcccgccttggcctcccaaagtgctgggataacaggcatgagccaccgcgcccggccatgcttcatttcagttcacctacaccccacactctgttccgaaaccccctaacaatcgtacccttccttttctcagccgccccatgggtctcctggagtgcagccccgtctttgcaaggaggccataaacctggctttgtgggctgcgggtctgtggtggggtctgttgcggggggtcctcgggctgactgggccgctgtatgtttctttcttaacttctgtccccgaagcgaggccacgaacttgctgcaggaccttgggcaaactacggacaccttgaagcctccacggcttcttgtgtggaacgggagggattgcggcatcttcagggcctggctgcaaccggtgtcctgggaccaccccaccggatgctcccacccgagcaggccaagatccccagacctggtcttgtgtcctccttccagaatgtggggccaggcctgcaatggagaagcccacccgggtcgtgggcgggttcggagctgcctccggggaggtgccctggcaggtcagcctgaaggaagggtcccggcacttctgcggagcaactgtggtgggggaccgctggctgctgtctgccgcccactgcttcaaccagtaaggcccgcctcctccaggaaggctgcccggcttcccctcctcaccagcccctccctgtcagaaaccatcctgctggggctgctgcatggaccccactggggagcagcccttcctctcctgagggcagctgagagacaggagggagccggtgccaaggcttctaaggacaaacagggcctaaccaggggagggggaggagggttccttccccattgcttgctacccaggcagcgtttatcttggagattcccaggcatggtggcccgcatctgtggtcccagctactcaggagcgtgaggcaggagaattgcttgagcccaggaggtcgaggctgcagtgagcctgatggtgccactgcactccatctggggcaacagagcgagaccctgtctcaacaaaaaagagactcataaagctgtagggggttgggggggggcattggcacaggtgtagaaaatgaagcctgagggtcccctgacttgtccgaggtcccccagcttgggatccttttcaggaggagcccagcagcccctctttccctggtcctcctccctggagccgaaggtcagaggatggtcctggggcccaggcagccctgtgtggcttcctgggggtgtgcatcagccctgtccctccccaagaaggcgggcatgtgctggagggcaggcatgtctgagggccctgtctccatagcacgaaggtggagcaggttcgggcccacctgggcactgcgtccctcctgggcctgggcgggagcccggtgaagatcgggctgcggcgggtagtgctgcaccccctctacaaccctggcatcctggacttcgacctggctgtcctggagctggccagccccctggccttcaacaaatacatccagcctgtctgcctgcccctggccatccagaagttccctgtgggccggaagtgcatgatctccggatggggaaatacgcaggaaggaaatggtgagcgctgccccatcgaggggaacggtggatttattctccagggcctggcctggggagggtcaggatgggcatctcttacctggaccctaaaccaattccactgcacagggacctctgtggctgatccctttgtctttggtcccgctgcccacacacctctcacttccccattccatctgggggcaaaatctggctgttgcctgtttgtataaacaaagttttattggaacaggggccatgttcacacatcaacagattgtctatggctgctttcctgcaatagcagcagagttaaatacttgtgacagagactggcccttaaagctgaaaatatttaattctctgaccatttatagaaaatgtttgccggcggccacatgtggtggctcacacctgtaatcccagcactttgggaggcccaggagggtggatcatttgaggtcaggagtttgagatcagcctggccaacatggtgaaaccccgtctctactagaaatacaaaaattagccgggtgtggtgatgcatgcctgtaatcccagctactcgggaggctgaggcaggagaattgcttgaatctgggaggcagaggctgcagtgagctgagattgtgccactgcactccagcctgggtgacagagcgagactcccatctcaaaaaaaaaaaaaaaaatagaaaaataaaaaattagccgagtatggtggcacatgcctgtagtcccagctacttaggaggctgaggcaggagaatcacttgagcctgggagttcaaggccgcagtgagccatgatcatgccactgcactccagcctgggcaacagagcaagaccctgtctcaaaaaacaaaaaaagcaaatgctcactggtgcttgcttgcgctagtctatcccgagacccctcccactccaacagttaatgcttcccttgacctcagaatggcctcctacaccttacccaggtgctagggcggcagccccatggggacagtggggagactcttgcgctctgagcgggccatcaggcccacctcctcctcactctgtggctttgtgagattcctgcaactctgtgagccctggtttcttcgtctgtggggtggggatgctgcatctcggggctgttatcggagcggaactggagctgctctgatgatcactgtgcacgtggcctttctggctctttccctggtagccaccaagcccgagctcctgcagaaggcgtccgtgggcatcatagaccagaaaacctgtagtgtgctctacaacttctccctcacagaccgcatgatctgcgcaggcttcctggaaggcaaagtcgactcctgccaggtaagcattcaaagggggaaagcgggcaatatttccatgaaatgcccacagccgttcacccagcagttctttgtgtgcagacctagatttttttcctttctttccttccccccctccttccctccttgtccttccctccttttcctttcctcctttccttccctccctttccctccctccctccctccctccctttccttccctccctttccctccctccctcccttcccttccctccctccctttccttccctccctggcctttccttccattccttccctccctccctttccttccctccctccccttccctccctccctttccttccctccctccccttccctccctacctttccttccctccctccctccctttccttccctctcctccctcccttcccttccctccctccctttccttccctccctggcctttccttccattccttccctccctccctttccttccctccctccgtttccttccctccctccctccctttccttcccttccctccctacctttcctttccttccctccctccctttccttccctccctccccttccctccctacctttcctttccttccctccctccctttccttccctccctccctttccttccctccctccccttccctccctacctttcctttccttccctccctccctttccttccctccctccgtttccttccctccctccctccctttccttcccttccctccctacctttcctttccttccctccctccctttccttccctcccttcccttccctccctacctttcctttccttccctccctccctttccttccctcccttcccttccctccctacctttcctttccttccctccctccctttccttcccctcccgccctctccttcccttccctcccaccctctccttcccttccctcccgccctctccttcccttccctcccaccgtctccttccctccctccctttccttctcttccctccctccctttccttcccttccctccctacctttccttcctttcctttccttctctctctctctctgtctttctctctgtttctttctttctgacggagtctggctctgtcgcccaggctggagtgcagtggtgcgatcttggctcactgcaacctccgcctcccaggttcaagcgagtctcctgcctcagcctcccgagtagctgggattataggcgcccgccaccatgcccagctaatttttgtatttttagtagagacggggtttcactatgttggccaggatggtctcgatctcctgatgtcgtgatctgcccacctgggcctcccaaagtgctaggattacaggcgtgagccactgtacccagcctagatttctttttctttttccttttttttttttgagatggagtcttactctgtcgcccaggctggagtgtagtggcgtgatctcggctcactgcaacctctgcctcctgggttcaagtgattctcctgcctcagcctctggagtagctgggactacaggcatgtgcctccacgtccagctaatttttgtatttttagtagagacgtggtttcaccatgttggccaggctggtctcgaactcctgacctcaggtgatccgcccgcctcagcctcccaaactgctaggatggcaggcctgagccactgcacccggccatagccaccatgcccagatttctgaagggctcaaccgtgcacacacagacaggttaattttcaggctgggtgcagtgcctcatgcctgtaattccagtgcttcaggaggctgaggtaggatcagtcgaggccaggattgcaagaccagtctggacaacatagtgagaccccgtctctacaaaaatttaaaaaaaaaatttgtcaggcagagtggcaggtgcctgtggtcccagctccttgggcagctgaactgggaggatctcttgaggccaggtgtctaggctgcagtaaactgtgatcacacagctgcactccatcctgggcgacacagcaagaccctatctcaaaaaacgaagggcgggtgcagtggcatgcattttgggaggccgaggcaggcagatcacctgaggtaggcagttcaagactggcctggccaacatggcgaaaccctgtctctactaaaaaactacaagaatttagccaggcatggtggcgggtgctggtaattctagctactccggaggctgaggcaggagaattgcttgagcccaggaggcggaggtcacagtgagccgagatcatgtcactgcactccagcccgggcaacagagtgagactccacctcaaaaaaaaaaaaaaaaaaatggcatcagatttcaatagtaactctcaaagttagatgccattattactaatcaatacaaaatatcaatgacagtgtaaatgcccattcacacacagtagttaaaaggaaggtggtaaataacctgcaatgggaacctacccagcccaagttcttcaatcagacttctgagttcaaatcctgcttcaactactgtgtgaccccaggcaagtgccttaacctctctgggactctgatccccatatgtaaagtgggaagcatagcaatgcctgtcttctaggagtgttgtgagatcggtgtcttgcatagtcttttcttcctatatattcattatatttgttctttatatctgacaataaaaatagaataataggtatttatagtatctattattatactatttattctctatataaatgggcgattcacaatagttagctttttatcttgaaaagaatgttgaggccaggccaggtggctcacatctgtaatcccagcactttaggaggccaaggcgggtggatcatctgaggtcaggagttggagaccagcctggccgacgtggtgaagcccccatctctactaaaaatacaaaaattagccgggcgttgtggcttatgcctgtagttccagctactcgggaggctgaggcaggagaatcacttgaacccaggaggtggaggttgcagtgagccgagatcatcccactgcactctggcctgggcaacaagagcgagactctgcctcaagaaaagaaataagcttggcagctagtggtcaggggctacttctagatggtgggactattcatggctgttattgttgttatttatttatttttttttttgagagggagtcttgttccgttgcccaggctggagtgcagtggtgcgatctcagctcactgcaagctccgcctcccgggttcacgccattctcctgcctcagcctccctagtaggtggaactacaggcgcccaccaccacgcccagctaatttttgtatttttagtagagacggggtttcaccatgttggtcaggctggcctggaactcctgacttcatcatctgcctgcctcagcctcctaaagtgctgggattacaggcgtgagccaccacgcctggccttattgttattatttttagagtttttctgcattgttttacctcctcaaaacaaaagcaagaatgatggaaactcagagaggagaagtgactcactccaggtcacacagccaggcatggggctgcagtcaggtctccagacccgcgctgtgccctctgccccccgccctcgatggctcccacccactgtaggaacgcaggagggtatggcagtgctgggaagagagggtccctggaggaccaaccagtgctctttccttcctttctagggtgactctgggggccccctggcctgcgaggaggcccctggcgtgttttatctggcagggatcgtgagctggggtattggctgcgctcaggttaagaagccgggcgtgtacacgcgcatcaccaggctaaagggctggatcctggagatcatgtcctcccagccccttcccatgtctcccccctcgaccacaaggatgctggccaccaccagccccaggacgacagctggcctcacagtcccgggggccacacccagcagacccacccctggggctgccagcagggtgacgggccaacctgccaactcaaccttatctgccgtgagcaccactgctaggggacagacgccatttccagacgccccggaggccaccacacacacccagctaccaggtaccgggagagacggagggatccctgggagtggagggtcccatgttaatcagcctgggctgcctaacaagacataacgtcgtccactttgggaggccgaggcgggcggatcaagaggtcaggagatcgagaccatcctggcgaacacggtgaaaccttgtctctactaaaaaaatacaaaaaattagccaggcgtggtggtgggcgcctgtagtcccaactacgcgggaggctaaggcaggagaatggcatgaagccgggaggcggagcttgcagtgagctgcatgccactgcactccagcctggcaacaagcgaaactccgtctcaaaaaagaaaaagacataacggcctctctggctgggcgcggtggctcatgcctgtaatcccagcactttgggaggccaaggcgggtggatcgccagaggtcaggagttccagaccagcctggccaacatggtgaaaccccatctctacaaaaaaataaataaaaaaagccaggcatggtgacaggtgcctgtaatcccagctacttgggaggctgaggcaggagaatcgcttgaacccaggaggtggaggttgcagtgagccgagatcgtgccattgcactccagcctgggcaacagagtgagactccagctagataatagtaataaaaataaaaagccaggcgtgatggtgcatgcctgtggttccagctactggggaggctgagacaggagaatcatttgagctcaggaagcagaggctgcagtgagccgagatcatgccattatactccagcctgggtgacacagcctgtctctaaaaaaattaaaaaaaaaaaaaaaaatgaaagcagggactttgatggttcacagctgtgccatgtccttgggtgcgtgtttcttgctaacttggcagctgccctcatgtaggtctgtccctgcagcctgggggctctcactttctcagtctcagctgattttgactttttcaatagctatggcgtgggatctctttgggcccaaaagaggtggagaaggcccccctcaaaatacaggcgggttctgtgtggaggtagctggtgttcccaaggacagcggctgcggctgctgtcagattatccaaggccacctggtcttatgtcagggccagacggtgccaaggctggtggggaactggcatttccccttactggccttggtagctgctgcgggttggatggcggttggtggggggtggggggcgggggggacccagggaagccagctgggtggtgatagagggcggcgggggggcttgcccctgaggaggaaaacacgcctctggagacagcaggtgggtatgggaccccctccatgggtggtaacagggtccctgaaaccccctggaaaccacccacgtgttctttccacagctgggttctgaggaaggcctttgcgcttggcaccgtctggggagggcttggaggtgatcagggatccaggcagagggcaccaaggcagggctggggcctctggggcggggccctggtgtgtgcaaaggccttggggtgggagggaactcctggaagacggagatgtgggaggctgccatgagaggggcctccggcaggggaaacgtatggtcccaaaactgaagtcataggaaacaaatgcatttccaatgttatttgagaaaagcccaaagaccaagcagcaggcccagtgtcctttcctgctgagttttcctgggataggtcccccatcacaacctactccctggggctcccagggggattcgtggagaggcggcgcccaggggggccttcgtggaggaggtgccctgggtccgcctgcccacgcgcctggctcccccgcagactgtggcctggcgccggccgcgctcaccaggattgtgggcggcagcgcagcgggccgtggggagtggccgtggcaggtgagcctgtggctgcggcgccgggaacaccgttgcggggccgtgctggtggcagagaggtggctgctgtcggcggcgcactgcttcgacgtgtgagttccaaacgctccaaatgcccctacatgtctctgtagctcacccggaaccgaactgttgcccgaaaacgcaccctgaccccctcctttgccgggagtgccctccccaaccccggctcccactgccccaggccactcctcccaccccccatctccccatcctcgctccctgcagccctcccctgaccacccaccccctagcctgaccacacggggctggggctgcgaaggccgagtcctaccccgcggtccccacctaacccggaagctgcggccccccccctccagctccaggctaagcccacgggaacattggggtcacttctttccccagccctcgcccctgggacttggctccagccccccaaagcccacccagtagaaagctgccctccccagggcccaagccctggcagtcgaggggtccggttttccagaggggacacccagctctgggctctgcagggctggaggtcagaaggggagggcaggcggggggcgggactcgcacggccactagaccccttttcagagcgctcatattaggtggtgacggctgcagttcccggtgccgcctcggtgcctgatgggggagactgagcccattcccagaccgacagccagagaccaagaggccaataaccctgcccagggtgccagccggccgctgggggacaccacaggggcgggggccgggggcgtgggggctcgggccgacgcctgtcctcgcgcgccccgcagctacggggaccccaagcagtgggcggccttcctaggcacgccgttcctgagcggcgcggaggggcagctggagcgcgtggcgcgcatctacaagcacccgttctacaatctctacacgctcgactacgacgtggcgctgctggagctggcggggccggtgcgtcgcagccgcctggtgcgtcccatctgcctgcccgagcccgcgccgcgacccccggacggcacgcgctgcgtcatcaccggctggggctcggtgcgcgaaggaggtaggcgcgcccggggccgcggtggtgcggggctcggggggcggccggacgcggtccccacccgccccgtctcgctcgcccgcccgcaggctccatggcgcggcagctgcagaaggcggccgtgcgcctcctcagcgagcagacctgccgccgcttctacccagtgcagatcagcagccgcatgctgtgtgccggcttcccgcagggtggcgtggacagctgctcggtgagccccgccccggcccaggggaccaggtcccgcccagccgccggggagggcgggttcccgctgccacgaagcccaccatccgggagccaccctccggtgcaggcttctccagcggatcaagcagggagcctttttggctctggaggaatttccactccacagccgtttattgggcaacccaccgcatcccatccccgggcctcggcggcagagcaggcagaggctgcagtgggaggcaccgttccactccgggaccacgtggcgggtgtccataaatgtctgccacctttgcattgagcccattttccagatagtgaaaatgcggctcccaggggaagtcactagggtcactcctagaggggccaatgacccaagggctgctgtaggggaggtaccggcctctgaaccccctttcttctctccccaacagggtgacgctgggggacccctggcctgcagggagccctctggacggtgggtgctaactggggtcactagctggggctatggctgtggccggccccacttcccaggtgtctatacccgggtggcagctgtgagaggctggataggacagcacatccaggagtgaccaccacgtgactgcccaggccgagactctacgtgaaagcaacaggagcagcaggccacccaacaccccaccccaccgtaccctacccaaggacgggtgtgggggggctgtgggtcatggggatgcattttggtaccaccctttgttccaataaacacagcccctccaccctagctcactggctcagcacctcagtgtcacagcgaggaccacctgcctggtgctccaccaggacccggggtggaacgaagcagggtcaaagcaagccctgacaaggggaaggctgtcccccttagcctttggggcaggggtggcagcagcaacacattcctcgtgactcagcagcccggtggcactaaggggaaagatggacttctcccaacccaggggaggctgagaccctccgagctggggttccagggacacgcgtcacctcttcccagagacccctcaggagggaaataaagaggtttctctccgtcctccaccaatttatttgcccatccgcaggaggtgacagctcctgtggtgtctgaccacccccaactccgaagtccagacaagctgtccgcccagaatatgaggctgacttgggcacactaggggaataccccaaaggcctgaaggaggtgccactgggctgccagcacttcaggaaggcacagggccccacacccccgagatccaagctgcactggctggcagggggcagggcggggggtggcgaggacacagtcccgtgtgtcccagcaccggtgccaccctcctaagccccgggcaggcagtacgtacatgcggaccccgcctctcaaagcacgtttatggaaatgaacagggtggggtggcccgcgctcgccggtcacatgttggctcgttcccgctgcagccgcgagttgtaggcgcgagacacggtgttccaggcgtccatgtagcggtccatgcacatggcgatgcacttctgcgggagcggaggggcgcacggctcagctcgggacttcgcggccccggggaccgccctgaccccggctccaggacgcccgggctgcagactacgcacgtgcagtgaccactccgtcgcacctccccgttagtctgcgcacgcgcagacacctcccccctcgaatctaggccctcgcgacccttgccccgaacctccgcgggtctcacctgctcggagttgtccagggagcccccaggtttccctatacacttccggaaacacttgtccgtcatcctctgtggagacacgcgaggctttagccgcgacgtcggcccccaggggtggccctgtcgcccccagcgcccgtccccggccagccccgcacctgcagcagctcctgcgcgttggccacggcgatctgcactttcacctgctccattatgagccctgggtccagcttcccgctgccggagcccccgaaatcggagccgaagccgccctccatggctccgcaaagtcaaccggaccgaggccgcgtgcgccgactcgtaactaactgcgccggaagcgggccgcccggggcaccacgggaaacggagtccgcgcggacggggacggaggactacaactcccacacgaccgcgcgcgcccgggccattcaaggtcgcgcggggggccctccgctcatgcggaggcctggacctgccgttacctacacgagctacccgtggttgcgactccgcgggaagagggaggccctgacttggccggggagtaggggggctactacgtgcggccgaggccgatcactttgtactcacgctctgcctccagctcgtcccgaagggcctgccgcgcatgcgcacgaggcacccggcgcgtctatacagcgtgttgccgccggggcggagcccggtcgcatcacgtgacgaagagtcagcttgtgcaacagcgtcggaggctcactagaaaaaaaagggcagggtcccatgcatcgcctgggtcctgtttacactagctacactagccagtgacctttttccttgggggtggagggatctttcttagacatccgcttcattagggcagaggccccggctcgagcttcccctcaggaataaactcagaggcagaacctaaaatcaaaatgtttattggagtgttgtacaaaaaagtttccagtcataaaatgtatattacaaatcattggaaaaaaaaaagaacacattaggcatgcatcttcttaaaaaccgaatctctgaaatgaaagtccatgccagccccagctgcagcccagctccgtttttgcaggttgtgctgtgacgctcgctggacgcagggcttggaagaggctgcaggcggcgacgccccaggactgaggagtccctcagatctttaacaaagaactgccgcgtgcaggcttcagaccaaccccagccaaagccgctggcatgaggacaggtgcatgatcggattctgggtcagcccgcaggcctcccggctcctgggctcagcggggcaggcttcagcgttaacctggcgctgtgcaccccagaacccgcgttggtccagcaggcgtgggcctccccccagggctgggtggcgtctgatgcttcgcagggagggcgctaggcttcgagtcacacggcacgggcttacacagagggatggtttcgcatcgttctaagcggcacacagctaagcgtatttggggacaaatgcaaattgtttcccaggccataaataacttttaaaaatttgattttcttagtgtttccaaagactcaattctcaatgaacctccaattacccacaggctgcccagtccacgcttctccccacccccttcagctaagggcacccgcagtcctaggaccacccccagctccacccaaggcaaatgtagggtggggggttctgtgggcctggggcgtgctgttttcaggacaggactgggcagcgtctggacatgaggacctgcgggttttgggggggactttgtccctgagcccagcctgcaaggctgtcggcaaatcacagaccaactccaggatacagctttgctcctccagagccaaaatacataggatgtggctgagaccactgcagactccccataggacaagatcaccaagacccacccccagaaccctcgctagcacgaagcccagccagtcgggtccgggtgattcctgctatgaaggtgggaaagaggacacagtctgtcgccagcattcccacttccagcggctggcagagggtatccccggggcaggcaaagctccctaccagccgcctgactgggagcacagcggcgtagcctccaggaggaaatgctttggtaagatgcgcccccctctatctacatgggaccgggacttctgagagcaaggacagcgagcaggggctacgtggagcagcgggtgtttctgctttgtcggccgctggctccttcccggcctggggctggggccccccattccttcctgccacaggcaggtccccagggaggcgggatgcagtcacaggggagcggtgccgcccccgccctgcagtgaacgccatggcccggagacggcgcgtgcccatggctcagttttggtgtctttaagacttgagctgcactttctgaaggaggctctgccgtcggagggtgccccagccccacgccaccccggggaggagggtcagcctgtcctcaaggccctggcgtgagctcctgacctgtgtactgaccaatgtaaaaaaataaatatccattaaaaaaataacttctgtgtatctatgagggagggtgtaaacggtgagctattgccgaaggggggtgccaggcattgggaagctggactgaggggcttgggtgcgtcgtgataggagtcaggtggccttggcctgtctgagaaacatggtttcagcgagaaaatcacagataaaagcacagtatggatagacgcatgtgtatatataggcacagggcagacggagctggaacacgggaggggctccacagcgctctcctccagagggtcaacatggtggcgttccctgcagacagctgttctgaaactcacagcttctgcctccaaggcaaccagatgtgtcccctccacatctcccctccctgcttattgttgtgacaggtcttacgacgggactgtcctcattcttccttccccaggtcttcccctcccctgccctgttggccttgcacagtcaggaactgaactgcgggaaaactcccccaaataaagtcaacggtccgagaaacccggccggtgcgctgccagaacgggaatctggaagcccaggcagcggagtgaaaacccgccctgggggccacgccatccccatgctggcccacacccgctgcgtggctgcctgaggagttcccgctgtccgaagctgggcagccagaatgcaggcttggccccgggccccaccaggtcgacgcctggattctgaatttggttttgtagaaagccttaaaaaaacccaccaccactgaattcctacgcagtttccgcgctccgtccgcagcagggccgtctcctgtcccctcgctagcctcgccggccctcctccctccaagcccaagcatcttctaaacctccgggtcctggccctgggcttccaatttgaccaaatggtgagatgaggagtggggtgggattgaaaagtctccggggcagcggcgaagtggcagcgaagtgaggctggaggagacccgccaggagggagggctgggggagacccacccacacgttctggcagttcgcttagaaattctctagaaatgtatcaagaactaaagaaagccaatgatataaaaatagttttcagtggctctgggtaaagaaaggtgtgtggatgaggagtgtgggttcacatcacgtagcagcctcttgaggtggtcctcgggtccccctgcaggaaggaaggaaggaaggtcggccatgatcagggccagcctggaggcagccggcaggtagatggctgcccccacctccccaccagggaggggctgagcaacaacagtgtctatttctagagccttccattccacttccatgtccccatgagcccgcctgtgagctacacattctgttctgggttccaaaacagtcacaggaacttgcgacgcacgcgtttaatgcagctgtggtttctgcactcatcttctccccagaagccagtattgaagggacctgtgtcttcgactgaggaagccggttgaccagagagcatttggggagctgttcaacacccacctctcaggggaccccctggccagctaccctgaggtctgtgatgtcgcaaattcacacgatgggcacgacccaggaggcaagaacaggtctctgccgtgctggtaacagccaaggctggcttcaccctgagccacggcagccagatggagctcccgtcggggatgcggccagcacgcatgtgtatgtgtgtgcacgagctcactctgccccagaggctgccccccagccgcaagtgggcacaggggtcctacctgttggtggaaaagatcctcctcgccaaactcggcttcctcctcctcttcctccccattctcattctcacgcatcaccgaggacttcttcacagtcctcatggccacttcctgtgcgggacaggacacggcggcatgtcccgggatcgggcccagagctgctgtggcggccccgagggtgcccagaccctgcccaggactccagccgagcaccccccaagccacacacacccacctcgccatccgcgttaaccaggacggtgcggaagctctcgcccgtgccccagctgctctggcccttccacaccagcgtcgagggggggctgtgggccacccccgcaccagctgcccacacctgaggacccaataacaatggccccatcagggtcacctctggttccagggacgtgggccagccagtggcccctaccacaaagcccccttcaatgccctgggcgttcagtccttccagcccgacgcaggcttatccagggtgatggtccccaggatacacaagaagagaccagggttcacagaggccaagggctcttggcaagcaggggctgaactgggatctgacacccaccaggctccatggcccatgcgcctgactgttaacacttcacggggacgcctgccagccccagcagcctggactcagacccagggcacaccactcaggctccagggaggcccagtggggtgacaccagcacatggaggttctatgactgcggcagccgctctgagacggtgcctggtgccaccatcatccccacccacccccgccaagtcctgtgcctccagtcccctgaccccacctcacaccccatccgtggccaccctcgccctcctgccccaccacctaccgtgaccatctggccggcgcgcaggatgtacttgggcgtgaacttgtaggcgatctcctccccctccaagacctgcctcttgattctccagttccccagagactgatcctggaagacacggcacacacctgaccctcagccaccaggactgtgacaccgcccccatcgccctggctggtggccccatcaccctgaccctggtcacccccaccagctaggtcaccccattacccccatgccctggtcattccagtcaccttgtcccctgcctcgtcctgaccggcggccctgtcaccctgaccctggtcacccccatcagctaggtcactccattacccctgtgccccggtctttccagtcatcttgtcccctgcctcgcattggccggcagccccgtcaccctgaccctggtcaccccatcagctgggtcaccccgttacccccatgccccggtctttccggtcaccttgtcccctgcctcgcattggccggcggccccgtcaccctgaccctggtcaccccatcagctgggtcaccccgttacccccatgccccggtctttccggtcaccttgtcccctgcctcgcattggccggcggccccgtcaccctgaccctgatcacccccatcagctgggtcaccccgttacccccatgccccggtcattccagtcaccttgtcccctgcctcgcattggccggcggccccgtcaccctgatcctggtcacccccatcagctgggtcaccccgttacccccatgccccggtctttccggtcaccttgtcccctgcctcgtattggccggcggccccgtcaccctgaccctgatcacccccatcagctgggtcaccccgttacccccatgccccggtcattccggtcaccttgtcccctgcctcgtattggccggcggccccgtcaccctgaccctgatcacccccatcagctgggtcaccccgttacccccatgccccagtcattccggtcaccttgtcccctgcctcgcattggccgacagccccgtcaccctgaccctggtcacccccatcagctgggtcaccccgttacccccatgccccggtcattccggtcaccttgtcccctgcctcgcattggccgacggccccgtcaccctgaccctggtcacccccatcagctgggtcaccccgttacccccatgccccggtcattccggtcaccttgtcccctgcctcgtattggccggcggccccgtcaccctgaccctgatcacccccatcagctgggtcaccccgttacccccatgccccggtcattccggtcaccttgtcccctgcctcgcattggccggcagccccgtcaccctgaccctggtcacccccatcagctgggtcaccccgttacccccatgccccggtctttccggtcaccttgtccgagttgttcttgagctgcacaaacttgccctccaggtcgatctcctcgatgctgacgctacccgaggccgaggcctgctgggccaggtggaagccaccgctgccacccgtgcccgtgcccaggacgcttgggccgctgcccaagggctcctccacctccagccgcttccgcttactgcggcccaggcgcccggtggcggacaagctgccgctgctgctcgaggtggctcgtgagacggtgacgcgcgaggatgggctgggggacagcttcagcctgtggggaaggcaaggaaggtgggactggtagtgggagccccagacagcccagggcacgcagagtggcggccacggcccggccccacctccacccctgcccagcactccccgcagccccgtcccgcctctcctcctgccctgcccctcctcctcactctgtgctcccaagcctcctggcctgccgcacctctcctcctcgccctccaggagcttccggtaggcgttgatctccatgtccagggccagcttcacgtccagcagctcctggtactcggccagctgctgctgcatcacgtcccgcatctccgtcatctcctgctccttggcgtccagcatcttccggaacttgtcccgctccccggccatggcctcctccagctcccgaatgcgatcttcagcggcactggcctgcggagggggcgggtggcgaaggtcagggcagcccatgggtcacaaggcccaggtgatcctgggactgcgggagatgggccctcaccacagactggggcagagaccaggcctgggcatggggcgcacgggaggggagggaaggggcatcgctgggcgccccgagggctgcatccgatgccaagaggccagagccccacgccccgcacatccagggcagggcccagaagttgggccagggggacggcagacggtggcgctgtgctcatcacctgcttctggaggccggagagctggtagctgagggactccaggcgcatgcgggcctccttcagctcctcgcgagccgcactggccgccttgtcgttctggtcagagctcagcttggcgctgtccagctgtggggagacgggcgggtgagtgcgggcgcggggcggggcggggttcccaccggccgcccccgcccacccgcctgccggccacaccttggcctggtaggtctgctccagctccagcttgtagagccgcacttgctcgtcgtgctggctccgcagctcctccagcgcctgtgccatcttgaagtcgtactcctgctgccggctgctgtccacctccaccaggcgccgctcgtgccgccgccgcgtctcccgcacctcctgcggaccaaggcttcgtgaccctctggtcccgcctgggccccaagcaccaggcccaagggagggctcaaaaatgtgccaagaggaacctccaggcaattcctggttccttgtgcacaagttacaaaccgatacacgtgcaggtgagaggcgacccaggggccgtccacgcgctagaacgtgactcagccacgaaaaggagcgaggctctgacaccgccacagcatggatgcaccttgaggacgtcacactcaatgagagacgccagacacaaaaggccacacggtgcgtgatcccatttccatgaaatgtcctgaaatgtccaggacaggcccatccacagagacagggaggggatgcgtgggggccagggctggggactgctgatggggagggggttctttttgggtgatggaatgttctagaattagaggtggtggttgcacaaccctgtggagatcctgccaatgctgaactgtacactttaaaaaggtggacttaaaatagccaggtgtggtggcgggcacctgtggtcccagctactcaggaggctgagacaagagaatcgcttgaccttgggaggttgcagtgagccaggatcgcaccattgcactccaacctgggtaacaaagtgagactgcgtctcaaaaaaaaaaaaagtgactctctcttataaaagccattattgaagaaagcgggccaggcgtggtggctcatgcctgtaatcccagcactttgggaggctgaggcaggcagatcacgaggtcaggagttcgagaccagcctagccaacatggtgaaaccccatctctattaaaaatacaaaaattaggccgggcacagtggctcaagcctgtaatcccagcactttgggaggctaagacaggtggatcatgaggtcagaagttcaagaccagcctgacaaacatggtgaaaaccccgtctgtactaaaaatacaaaaattagtcgggttggtggcacccgcctataatcccagctactcaggaggctgaggcaggagaatcgcttgaacccaggaggcggaggttgcagtgagctgagatcatgccaccgtactccagcctgggtgacagagcaagactccgtctcaaaagaaaaaaattagctgggtgtggtgctgtgcacctataatcccagctactcgggaggctgggcccagtgtgggcaacagagcaagactccatctcaaaaacaaaacaaaacaaaacaaaacaaaacaaaaacagtagaaacgcttctgaaggaagctggccacctttgcagtcagcaaggcgggtagcccaggcaagcagagccctgcgggccgcgcacccacctccacggccgccctcccgcctccacggccgcgcacccgcctgcacagccgccctcccgccttcacggctgcgcacccacctccacggccgctcacccacctgcactgccgccctcccacccccacagccgcgcacccacctccacggccgccctctcgcctccacggccaccctcccgccaccacggccgcgcacccacctccacggccgccctcccgccaccacagccgcgcacccacctccacggccgcccttccgcccccacggccgccctctccaggactccgcaccctgtgggctgcacaggcctgcatcatcaagctccctaccgcagctccctgtgagggcccctccagggcctcttcccggcccctgcaccgccttcgtgggtcttttcccaggtgccctgtgggttccacctggggcacgttcctgggcccccgcacagaagctctcgtgagtctcttcacgggctgtctcacaggtttccccacaggccccttcacaactgccctggcggcctcccctctggctcctgtggggccccccccactccctgggcctggccagagcggggcgcagctcctgagcggcctggacatccctccaccagcagccagcagctctccctgggcagggagtgtgggcccggccggccccggcattccaccctgcactgtgacagcacaattggttctaaaggacacaggctgacgcctttcctccccactcccctctccgagcccccggaggcagaggccccaggtgaggggctgcaggtcagggaaggaggctgggtggggagagcgggcctcaccctcgctttggacaaggaggccctgtgggaggctggacggtggcacccagaagatgcacctgacgcctgcctcatggtctagcagttaggatcccaggcggccagggttcagctctcagggtgggaacaccaagcttttagaaaggcaagaaatcaaaatagaccttccttgacactgaagagatatgttttggctgggcatggtgactcacgcctggaatcccagcagtttgggaggccgaggcggatgaagcacctgaggtcaggagttcgagaccagcctggccaacgtggtgaaacctcgtctctactaaaaatacataaattacctgggcatggtggtgcacgcctataatccagctactcgggaggctgaggcaggagaattgcttgaacctgggaggcggaggttgcagtgagccaagatcgtgccaccgcactccagcatgggtgacagagtgaaactccatctcaaaaaaagacgtgcccacatcccgatccccagcagctgtgaatggaccttatttggaaatggggtctctgcagatgccattaggtcactctggatgatccaggcaggccccaaatccaatgacaagtgtccttgtaggatacacagagtatggacacaggggaggcagccgcgggaagacagaggcagacactggggagacgcagccgaagccaagggcaccctaagaggcaggaaggagcctccctagagccgtgggagggaccccggccacacggtgccctcaggcttccgccctccacagccatgagggtggactttgcgtttccgctgtgccaggctggaggccaggccactcactcacctcctcgaacacactcttccggaagtccagctcctcctgcaggctctggcagcggttctccaggtccacacgcatcagcgtctccttctccagctgctttttggccactgcatgaccgtcctcggcctgggagacacaggacagcgagctggtgtgacaatctgtctgttgcatataccctgctggggcgtcccgtggctcctggcacctaccttggccagctgggcccgcagctcagccacgtcactctccaggccgcgcttgtcgctgagggcagctgccagctccacctcgctccggtggaacagggactccaggtccttcacacggccctgggccaccgtaagctcgccctccctcttcttggcgctgaaagtcaagagggcaagtgagtggggaggggcaaggtccatggggccacagggagcacctcagggggcgtcaggcaagcccaaagacaaggtcaccgaggcctccgagccccagaccttcccgtcctgcagacgacgcggccccacgcgcccaggcaaaggcacacgtgccctcatcatctgccctgcactgtcaggagtccagcaagtgacaggcaccagcgcttgggaccaccctggaggcatgggctttcccagcctctcctgcctgttctggacccaggacgaccatttggggagaaattaatgcatcctctgtaaatgttacaaagaccctggcctttgaagggtcagccttgtttgtaaacttaagctgtctgaagcaggctcacctggttttccactaaaccaaattagctccaacattagatatttaagatagcaaatactcaggctttttaaacacacaaatactaccagtgtggattgtaggcacttaagcttttttttttttttttttttttttttttttaagagacaggggttcacttgtttgcacaggctggtctcgaactcctgggctcaaggaatcctcctgtctcagcctcccaaagtgctgggattacaggtgcgagccaccgcgtacggctgactcttaaatgtttttaagcataattataagtcttggagctgaattttaccccctcccgacagggaactaactatatcctcccaagaaacagtgaggacacccagggttccgcagcgtcacaactgctgacatctggggtggtcttgagtgagggcacccagggttctgcagcgtcacaactgctgacatttggggtggtcgagtgaggacatccagggttccgcagcgtcacaactgctgacatttggggtggtcctaggcactgcagggtgctgagcactgtccctggcctccacccacttcagaccaggagcttcttgctgcccagttttgacaaccacaagtgtccccaggaatcacccagtgtcccctggggacagaatcaccccaggatggggacaactgggtgtatctggaataacacagccaaggctgctggctggacattcaaagaacatccacatccaggcggctcgagcccgtggccagaggtcagaagtgacagggacctctcctgcccagcagaatgcactcccgactctccctagagcctttttttttttttgagttggagtttcgctcttgttgcccaggctggattgcaatggcgtgatctcggctcactgcaacctccgcctcccgggttcaaacaattctcctgcctcagcctcctgtgtagctgggattacaggcatgcgccaccagcgtccgctaattttttatttttagtagagatggggtttctccatgttggccaggctggtctcgaactcccaacctcaggtgatctgcccgcctcggcctccaaagtgctgggattacaggcgtgaaccactgcgcctggtcccccagggcctttcaaaagaccacctaggcatttgcccaagaaatgaaagtgacccatagctgaaagtgaccgtatgtctgtctaagtatatctccatcaataactgtatttatctatataatctatgtccgtatatatcaattctacagatggctgtatctttttttttttttttgagatggagtttcgctcttgttgcccaggctggagtgcaatggtgcgatctcggttcactgcaacctccacctcccgggttcaagcgattctcctccctcagcctcccaagtagctgagattacaggcaagtgccagcacgcccagataattttgtatttttagtagagacggggtttctccatgttggttagcctggtcttgaactcccatcctcaagtgatctgtccgccttggcctcccaaagtgctgggattacaggcatgagccaccgcacccagccttacagatagctatatctatctattgctctatctattactgtctatccatctacccatcatccatccatccatccacccatcatccatccatccatccactcatctgtccatctatccatccacccatcatccatccatccatctactcatccatccatcatctatccatcatctccatccatccatccttccatccatccctcaatcatctatccattcatccatctactcatccatccatccatccatctatccactcatccatccatcatctatctatccattatctatccatcatccatccatctactcatccatccatcatccgtccacccatccagccatccatccatcatccacccatctccctctctctctcactagctgccaagctctcactctctgtgggactcttccttccttccttgtgtgacccggggagggagggctgccttcccagctcacagtgccctccctgcctaggatccgtaataaatcttcaaacttgtttcctatcgctgtgctgaatttgcgccttctgtcagaagaaccaggagctgccccaggctgggatcccagtgccagagcgatggtcggacaggcataccctggacacaggtcagacacgagctacggggcagccactgtgtaaacaggtctctcgtgtgaggggtccctggtcgggggtcagacaaccaggtctaaggccacctgccaggtaaaagcatccgtgccgggtaccctgaatcccgggtctggctccggttgtgtcccgccagggcagggcggccagccgctctggcgctggacctggtgtagccagggctctccacacactagaggtgtggcatctgcttgcttttgagaggcgtgaaggccagagacttcggccacaaggctgatgcacccctgtccgcagccctcagggacactaagctctacttccccacatggagcagatctccagcagggtctggggtgcagatcccgcatctctgagcacatgccacacaggccaggccctttcgctcagagggctgcgagccctgcggccctgctggggatttttgcaggggtttgggggaaggtggaatctgttgggcaaatcccgagtgcccgctgtgtggaaggcaccgctctcacaccagaggtgcatctagaacccttgccttacactgcgggacgtccttgcggagggaggcatcagcgacacaggctgcctaccagacaggaggttgcctgggggcagggctggagtggggctgggagacaaccctgggggcagagacctgaaggagcagtgctggaggagccagggccaccgctgctgaaagagccttccaggcaggcgagcagcagtgcaaaggcccaggggtgaggtggaagaggcaggctgcagaccagctcagaggactggagcggagatcggggaatccgggaagctcctcagcaactcggtctaaaccacagggttccgcaggactgcagggcacacccagaaggcagggtgcgggctcccagggctcagacccgtttcctaagcgccaggtgctgagttagaatcttcagctgggtgcccggggttttgtggcaggctctggcttgttaggtcctgcacgctgctcccagtgtttctctcattgtggggttttggagataaatttgttaggataagaaaaacattaggcttggcccagtggctcatacctatacccagtgctttgggaggctgaggtgggaggatcactttagcctgggagttgaagaccagcttgagcaacatagcgagacctcatctctacaaataataaaaaaattaggccaggcatggtggtttacatctgtaatcccagcactctgggaggccaaggcgggtggatcgcttaagtccaggagtttgagaccagcctggccaacttggtaaaaaaattagctgggcaaggtggtgtgagcctctaatcccaactattcaggaggctgaggcaggagaatcgtttgaatttgggaggtggatgttgcagtgagccgagattgcaccactgcactccagcctgggtgacagagcaagactatgtctcaaaaggaaataaataaaaaataaaaaaaattagttgggtgtagtggtgcatgcctggggtcccagctactcggggtggggctgaggcaggatcacctgagcctgggagttcgaggctgcagcgagctatgattgtgccactgagctccagcctaggcaacagagaccctgtcttaatgaaaaggaaaagacgggcctctctgtagatgccacgcactgctcaggagattgtgaactgggaattcctcaacacctagggcgggcactgtgtaccattttctttttttaatgttttaatttgaggtgaaattcacatcctgtacatttcaacatcttaaagtgaacagttgagaggcgcctggtgcggggccagcagcagctctgtcccatctgcacggtgtagttctgacatttcagagctccgtgcacccctgaccaagctctagtcatcccacagcctgcatggctccactgatgaacctgcttattaaacacggtgggtgctggaggtagacagcacagagctgctgcctgagcaggtcccggggtgcacctgtgctgtgtgggatgtgctgagagtgggcagcctgtcctggctggtgcctggccccagggtccccggctcatggccaccatcagggcacaaatggtccctcctggagccccaggccccgggcaggcgggcggtggtccctgggctgacctggagggtctcctgttggggaagggaagtcagctctccacgggagcagcgccagcccaggaaggaggagggcgtcggatggagaggtcacctgcaaccacgcatgggggccccggcactgttggacacagggtccccggtcattcctctggccacactccaactcagggacaacgtggattctcaagccactggctgctgtcacccccgtaccaggtggccgaggtgccacccctcctgccagcagatccctccatgctgagccaggcctgcgtggctctgggagaatgagcagtgtgggaagaccctgacccaccccagcctgaggaaatccgaggcacctgcaggtgcctgaatgccggtggccggagaccacggaagacagtgtccacacgcagggcaccagagacctcgctctagctggagcctcacatcaagaaaagccttgagctcagtgtttcattggcctcctggctcctctgaataaatattccttttgtcatcatcgttctgtttaaattgccgcccaaccacatcccacgcccagaatcaggcaagactcactgccaggctgagaggggagatcgtttctgccgatggacacagttgtcacccagaaggactttgcagccaaccctggggcagcccaacaacccatgagcaccctggtcacacaccacacacccgagcgtcccaacagctgggacaaaaccccggcaccaagaacatccaaccacagggaaatgcctacgatggggcctgaggtcaaacgcgtctcacggtgtccactgggtgccgcccggggtctaggtaagcatgtgcaagcgcgtgtgcacactaaggagacaggccaggctgaccaggaagccctctctggggaggctcgcgggagattttacttgtgagcttaagctgccctgcgcttcctgctgtccgatgtgagcatctatcactttcctcagaacagaaaaagtgacgtggcagccactggtgggggagagaggatgggagctgtgagctccaggctgtgcccgtatcagagcatgccccgcacgagcccagcgcccacctgcccccgtccaccccgtggtgccaggatcagggtgacgtcgtgcccagccgtgaccactcacctcttgttgacctcgtccaactctgccctcagcttcccaatctctatctgcagccgggcacgctctcgagccgtctcatccaggactctccgggcatcggccagctccgactcgtacagcgccttgatgccactcacctggggagacccaggacagggtgaagcgagagggacccttccccttggactacagcagtcagggggcccggccactggccctgctcagattcccagggactggcacgcagagagagaggatggcagcctggggacactgggacaccctgtgttgcccatctcacagacacagcaaagggagccccctgtcggggagggtccggtaaccaggaggaagccaggcgaccctgggtcccagccatcccaggagcctcctcctctgctgcggccccctctggaatgatcgtctctccacgagctccagctcccagaacagcggcgcccagtgctggagaccaaaggccctgggcctggaccagcacagcagctggatggagcctgtccccttccccggaggaccagccacacctggacatgcagccccttggccgctgtcatagcgacacgatgcctggccattagatgcatttttcacactctcggtttcagaaccagaaaactggtgggatgtttaatcaaggatctctcccgctgggcaccatggacactgggctgatcactctcggacaactggtgatgacagcaacccggggccctcccagaccccactgggcctgagagccccctgcccccaccagcctttgcaacctggagtcccctcccagacccctctgggcccctgagactccccccaggcctctgcaacctggagcccccgctcccccagaccccgctgagcccaagatcccccacttctgccaaccgggggccagcccgtgcccctctgtgcccctacctcacacgcaggcacatggcccaggctcaggctgggctgttccctgggatggagggaggagcatctggccttcccatgctgtgtccccccgacaggccagctgccaatgtggtggctcggaggctccaggacagaagctcccacccctcaatcacagagatctgcagtcagagtccccagctccccaccccaccagcggcccccacctttcacccctcgatcacagggatctgtagtcagagtccccaactccccaccccaccagcggcccccacctttcacccctcgatcacagggatctgcagtcagagtccccagctccctaccccaccagcggcccccacctttcacccctcgatcacagggatctgcagtcagagtccccagctccccaccccaccagcggcccccacgtttcacccctcgatcacagggatctgcagtcagagtccccagctccccaccccaccagcggcccccacctttcacccctcgatcacagcgatctgtagtcagagtccccaactccccaccccaccagccgcccccacctttcacccctcgatcacagggatctgtagtcagtccccagctgccccccccaaccagccgcccccacctttcacccgtcgatcacagggatctgtagtcagagtccccaactccccaccccaccagctgcccccacctttcacccctcaatcacagggatctgtagtcagagtccccaactccccaccccaccagccgcccccacctttcacccctcgatcacagggatctgtagtcagtccccagctgccccccccaccagtcacccccacctttcacccctcgatcacagggatctgtagtcagagtctccagctccccaccccaccagcggcccccacctttcccgacggagacccagcccagccagcaaggacatggggaggggctggagagccaggggtcaccagggcaggcagaagcgactggaacaccctctgggccgcccagctaaagaaagcccctccctaagccccgcgcaaagcccccaaacccgcccctctcgagggcctccaggtgaactcgaggcacatgcggtgccagggaaggcgacctcttcacttcctactaatcctgctgcaaccacagccgccacctgcccggcctctgcacgcgccagctgggggcacagctcaggcttctagtggccttcctgcctcccctcctcccacagggccatgcactcagtgagtttaaaaatatgtggaagcaaaccgcagtgagatgccacttcgcaccagccagggcgtccgtcaagaagacagacagtcgcaggtgcgggcgagtacgcagagaaatcggaacctcacaggcagcggcaggaacctgagctgagacagctctacagaaaacagtccaggggctcccccaagagtcacagagccaccctgtgacccggtaactccactcctgggtgtggacccagaagacatgaaattcacatccatgcatgtttgaaaactacacatggtgccgggcgcagtggctcacacctgtaatcccagcactttgggaagccgaggcgggcggatcacaaggtcaggagatcgagaccatcctggctaacacagtgaaaccccgtctctactaaaaaaacatacaaaaaattagccaggcgtggtggtgggcgcctgtggtcccagctacttgggaggctgaggcaggagaatggcatgaacccgggaggtggaacttgcagtgagccgagatcgcaccactgccctccagcctgggagacagagcgagactcagtttcaaaataaataaataaataaataaaatgaaaaataaaaataaataaaaaaataaaagcaatgcggtccctccaccatccacacacaggaacatgacccagctgtgtaacggagcaaggttctgacaccacagtgtggatgccccttgaggatgtcacactcatgagacgccagacacaaaacgccacacagtgtgtaatcccatttccatgaaatgtccaggtcaggccagtgcacagacacaggcagcgggtgtgtgggcagcggggctggagaaggggacggggagtgaccgctgagggggacaggcttcttttagtggggatgaacgttctaaaattggacacattggtggtggcacagctgtggagatatgaaaacgcgaaacctacgggtgagctgggtgaaccttatgaggcgggaattaactgctccggctctggcgctgaggaaaaggaggaccggaggatggtaggcggaaccaggcccagcaccacccgctagaacgccgtgatgttcccacagccctacagggccaagggtgtctatgcaaggtgggtacagggtcggcctgcatctggagggccacacccccatgttacaggcgaggctcctgtgcagagggctgggggcctgccaggacgcaccccttggcagtgaccgggcctcttctgaggtgggaccctcagcctcaaaccaacgcatgctgggccatctggacaagtcagagtctcaggctgccccagcaccgcagctccaagtcccgtcagcctacagtggggcgggataagggttcccaacctgattttatgtatgggaaaactgaggcacgggtcagtaaaaagccgcctcctgaccaccgctgggtcctagacatatcaggtctgcggggaccaattgtaggacggggacccacagaggcagcagtgcaaagcgagctcctcccgcggcaccccggccacccccaagccctccctcccatgcaggcgatcatctgggccgtgccctccacatctgtgtcctgggaacagacttctagaaaaacccaaatcaggaaaaagcggccagctccacgctgcaaacagctgggcaccaggtgcaggcatggtggtgtctgcctctccctcaaagctcccaaatacccctaacctcaagggaggggctgacgggacaccctcaggatgggggtcacacacgagctctcctgtccccacagagagagagctgactgcggctcacgaggcagaggggccaggatgaacaaaacagcagagtttccaacaaagacaagatcagcgccgggacacacaggagcccgttcaaggtgagaaaaaacagcaactctgcaatggcagccacacgcacagaggcatgctgagcacccccagaccatgtgcacggcggtcctgtaagactctaatgcaaacctggcatgggggctcacccctgtcatcccagcactttgggaggctgaggtgggcggattacgaggttaggagatcaagaccatccttgttaacacggtgaaaccctgtctctactaaaaatacaaaaaaattagccgggcatggtggcgtgcacctgtaataccagctactcaggaggctgaggcaggaaaattgcttgaacccaggaggcaggggttgctgtgagccaagattgggccattgcactccagcctggcgacagccagactccacttcaaaaaataaaaagaaaaagaatctaataccatattcttactgcacctttcttgtgtttatttacttattttgagacagagccacacccagcctggagagcaatgccgcaatcacagctcactgcagcctcaaactctgggctcaagcaatcctcctgtctcagctgccccaatagctgggactataggcacacatactactatgcctgcctaattagtttctaactttttttttaagagatggggtcttgctatgttgcccaggctggtctcaaactcctggactcaagcaatctgcctgccccagcctcccaaagtactgggattataggcgggagccaccgcacccagccctttctcgtgtttaaatgctcacatacttaccattgtgtaaccggtgcccacagcattccacagaggagcgggcggtgtgggtctgtggcctaggaggccacgcccaagcctgggtgtgtggtggcttccaccatccgggagtgtgggagtgcactctaccatgcccacacaaggggcacgtctcctaacgacacgctttccacaaggtatccctgtcactaaacgacacctgacttgaattaatagtttgttcattgtagattttttgaattaattgatttttaaaagataatccattagggcccggtgcgctggtgcatgcctgaaatcccagcactttgggaggctgaggcgggcgaattacttgaggtcagcagttcgagaccagcctggccaacatggtgaaaccctgtctctattaaaacacaaattagctgggtgtggtggtaggcgcctgtaatcccagctactcgggaggctgagacaggagaatcacttgaacccgggaggcagaggttgcagtgagctgagatcacgccactacgctgcagcctgggtggtacagagagaccctgtctcaaaaaaaatatacatatgtctgggcgccgtggctcacgcctgtcatcccagcacttcgggaggccaaggcagttggatcacctgaggtcaggagttcgagaccagcctgaccaacatggagaaaccctgtctctactaaaaatacagaattagccgggcatggtggtgtatgcctgtaatcccagctacccaggaggctgaggcaggagaatcgcttgaaccagggaggcggaggttgtggtgagccaagatcacgccactgcactccagcctgggcaacagagtgaaactccgtctcaaaaaaaagaaaataaaatacatatacatatacatatatatatacacatatatatatatattccattaaaacattactcatcccatcgccccagcgtgacgatgagcaaaacaacacacaaacccccattgaggaacatcctactgcacacctgcccagcccgctcaggaccaaccagaacctctaaccaggaacgtgggggaaactatcagcctggaggagcctgggagacagtgacgtagtcactaaatgtcacgtgagatagtggatggggtcttggggcaggaaaggacatcggggaaactgaggaagtctgaatacatgatggatgttgctgggagcagtggctcacagctgcagtcctacaactttgggaggctgaggcaggaggatcagcctgcctcagccttccaaagtgctgggattacaggcatgagccaccgcacctggcataagatgatgggaggctgaggcgggcagatcacctgaggtcaggaatttaagaccagtctggtcaacatggtgaaaccccatctctactaaaaacacaaaaattgcaccattgcattccagcctgggcgagcacagggcaagactctgttgcccaggctggagtgcagtggcatgatctgagctcacagcaacctctgcttcccgggttcaagcgattctcctgcctcccaagtaactgggactatagccgtgcaccaccacgcccagctaatttttgtatttttagtagagacggggcttcaccatgttggccaggctggtttcaatctcctgacctcgtgatccgcccacctcggcctcccaaagtgctgggattataggtgtgagccactgcgcccagacggtttttacatttttaaatggctaggggtagccaggagaggtggctcatgcctataatcccagcactttgggaggcagaggctggcagatcccctgaggtcaggagttcgagaccagcctgaccagcatggtgaaaccccatctctgctaaaaatacaaaaattagctgggcgtggcagtgcaaacctgtgatcccagctactggggaggctgaggcacaagaatcgcttcatcgcctgaatccgggaggcagaggttgaagtgagcggagattgtgccactgcattccagcctggaaaacgagactgtctcaaaaacaaaaacgataaaggccaggggggaagatgaagagactttgtgacacaggcagattctatgcacttcacagttccatgtgtataaataaagttttattgacacatagcagcacccacttattcacctatgggctaaggcagctttcatcctatggcagagctgagtggttcagatgcagacagtctggccttttttagaaaaagtctgctgaccatgcctggtctgccgtgctgtgatgatgaggaaagttctagaggctggggcacctcacaaagaccctttgagcctgcggaacgggtgtgccggggcaggacggcctccttgtgcttgtgaggcgctgcaaagggctggggacaggctgggccttttctttcatctttcacggcatctagcaagtgctaggcttgagggaagtcaacaagtgtgtccacacatgtgggcctggcagggctcagatagcctgagatggcctttgcctgggacccctcggacacacagagcagcataactcggctggaggaggccacggtgggacaaaatggcccggctaagaactacagccctgtgcagaaaatgcaaacaccggcttggggtcacttccaaagtggactccatcctccacgctcgcctgggccgcctccgagaccccctccagcagccctgagcagccaggggacaccggggcaggggaagacagaagatgccgaagccaggtctcctccctcgggaacgtaaggcctggcagggaagtacctggagtacctgcctctcccgcgcctggacacgggccacagcgcggcctccctgcacctgcccccgcccccagcactcagtgatcctccttcaacaaatacccatctggccagcccccaccccaccctttcccaagccctccaacgatgcttgtatatggcgattcatccacaccgccaaaagacaccccctagtgtcacatgggaatgtggaacccatgcttggcctggttttgtacgagtgtgcaagggtgaactcctgcgggcaggaaagaagtgagcaagttagccgggcatggtggtgggcgcctgtaatcccagctactcagaaggctgaggcacgagaagcccttgaacccaggaggtagaggttgcagtgagccaagatcacgccactgcacaccagcctgggcgacagagagagactctgtctagaaaaaaaaaaaggccaggcatactggctcacacctgcaatcccagcattttggaaagctgaggcgggcagatcacaaggtcaagagatagagaccatcctggccaacatggtgaaatcccatctctactaaaaatacaaaaattagccgggtgtggtggtacacgcctgtaatcccagctacttaggagggtgaggcaggagaattgcttgaacctgggaggcagaggttgcagtcagccgagatcacaccactgcactccagcctgggcgacagagtgagactctatctcaaaaaagaagtgagaaaggcgtgtgtgaggacctcgggggccgccacacaccaggatgctgtgagtcgtgttatgagcctgaaaaaatctgaactgagtccctcacgcctcccagcaggctcctcggcctggccattctcatgggggccgtgttaccctcatggaggctgcgtcatcctcgtgggggatgggtcatcctcatgggggctgcgtcatcctcatgggggctgggtcatcctaatgggggatgggtcatcctaatgggggctgggtcatcctaatgggggctgggtcatcctcgtgggggctgggtcatcctcgtgggggctgggtcatcctcatggggctgggtcatcctcgtgagggctgcgtcatcctcgtgggggccaggtgattctcttctcggggcgctgagcagtacccagcctccacccacgctgtgccgatgccgtctccctcccaatgtgacaaccaagggcatgcccagccttggccaagagtcccctgggggcagaagctggccaggtgagagaggccctgctgtccaggtgacctgcatgctcttaggcctgacaccccaggtccctcctcgttcagagctccctcccctgcccccatcctgccagcctgagcctgaggctgctctctgaaccccacgtggcccacctgtgtctagaaggcccccagctattccaggtcactccctccatgtgggcccacatgacgtccccccaccagcggcccccaccccagcaggcttccaactctgctccccactagccgggttcctggcccactagtcgcaggcggaactcccagctgtcccctgccacatgccctgcagacacggctgggtgacagggctcacggaggggccagtgtgtcacctgctaaatggctgccttcactggagtcagacccgcatttcacccagcctgagtgaactgagttgtaaaggatgctgctgcggccccgagaggtggctgggccaggctccctctagggcacagggccggtccaatggggcgtccagtggggctggggctggtacctccccagcactcaccaggccctgcaccctcaaagctccctgcagctgttcgtcccattggcaggtgggataacagaggcccaaagacaagaaaccagctctaaccctgcacgccacgggtccagcaggcggcctctaagttgggacaactccgcactggacagatggcaagatggaggctccaagagacacaggggcctgcccaaagccacactaattgaaaagcaggggactggccaggcacggcggctcacacctgtaatcccagtactttgggaggccgaggcaggcagatcacctgaggccaggagtttgagaccagcctgaccaacaaggccaaactctgtctctactaaaaatacaaaaatgagccgggcatggtggtgaacacctgtaatcccagctactcgggagacgggggcaggagaatcacttgaacccgggaggcagagggtgcggggagctaagatcgcgccactgcactccagcctggacgacggagcgagactctatctcaaaaaaaaaaaaaaaaaaaaagaaagaaaagcaggggatcccaccaagcactgatcttccttctacctccctgaaggcaccagctacattctttcaggttccctgtccccagggcactgtgaaaacaacccacagggagctactgaacaaaagttaacctgctgtggccccacacacaagtaagaggtgggtattataattacacccattccaaaggcgagggcactgagacccagagagggtaagcgactagcccaaggtcacacagagggtaagtggctcccagaaatgacccgaccccctcaacaagcagctcttctcccagaagcccaccacgtcctctgatctccagatgggcgagtggggactgggcgctgcaaatcccgacttcggcacccagctctcccaacaggacactggggcctagggaccccaggaccccaacccatggcaggaatcaagtgggtgctcctgcctgccccccgttctggagtcctgtccttggattgggcatggccagtgggagggacaaagagcctccccagggttaggttggggggcaggacagattgcacccagaccccaagacaccccgacctcatgtccccttggtgggcagactttcccgcctcttctccttcagtctgcactgaagcctcggggcccattcagaacctcaacactttccaccggacccaagatcccaactctcacccttccttcatattctcttgggggcagaacctgccagaccaccgctgacaccagggcacaaataagggactcccaaatttcccgtgggaccccaaggtatcagaacctctccctcggccccctacccaccctgggcctggtgagagatgaggggcctaattcccaccccagtcaccaatctcttctggattcatcagggaactcgctaaagctccagggagaactgagaccacgtgactcaccccagagactccagggagaccccccacacaccccatcttgggcctcctcagagggcctgggccccccagtctccttggagcccagagaccacccccattccaccccagataccccaatacccagcttcatccccagagactcccactcacaccccctcagttggggggggtccgccaagtctccttggaatcctctgagggacgaggcatatggggggctgcagcccaatactcagggagcccccaaatccccaggacctctctttggtggggagccctagtctgtaacccccatggccccaaaatgcacctctcacggaagggtccccagagctagctggaggcccctctgcagccctcactcaggacacggaagatctcctgggaccccctccataggtggggcattcctggtctgcacttttcactcagtgccctagaaaccccctggaggtccccaagagaatgggccactccggtctgcacccctcccaaggggtcccccaagatctcggaaactgcggtgggcagggcctgcccaggtggcacccctcactcagggtctccccctggagatccccgaggccaggctgaccccacccctgctcagggtcccccgtgatcgcgtactccgcggtgggctgggcctggccgagctgcacccctcactcagggaccccttgaaaccccctggagacccccaagccgggacccttcccggtctgcacccctgcccagggtccccgcgatcgcgcaccccgcggtggccaggacctgcacccttcatccaggagccccccgcaaaccccctggagaccccaagccgggagtcgttcagagtcccccgcgatcgcgcgccccgtggtgggcggggcctggccgagtagcacctttcactcagggactctccgaaacgcggcggagatccccgaggccggactgtccccgtctgcatcccagctcagggttccccgcgactgggagccccgcagtgggctgggcctagccgagcagcacccctcactcagaagcccccaaacctcctggagacccccgagccggagcctgtccccgtctgcacccccgcccagggtccccgcgatcacgcaccccgcggtgggcggggcctggccgaactgcaccgctcactcaggggcccctcgaaaccccctggagaccctcgagacccgggcccgtccctgtctgcacccagggtcccagcgattgcccaccccgcggtgggagggacctggccgagctgcacccctcactcaggggccccccgaaaccccgcggaaacccccgaagccggggcccgtccccgtctgcacccccgcccagggtccccgcgatcgcgcgccccgcggtgggcggggcctgccggctgcacccccgcccggcccctaagccccggcgcccacctcgcgcgtggtcacctcctccttctctgagatcttgagcaggagccggtcgttctccagctccagcgcgcggacgcggtcgatgtagtgcgccaggcggtcgttgagctcgcgcagctcctccttctcctgcagccgcgacaggcgcgtgggcgacagcggcgtggcgggcccgcccgcgcggccgggcagcggcgtggccatggtggcggcggctcgcggcctgcgctgctcccgacggcggcccgggctcggcgggctcattcaatccgcgccgccggctgcaagatggcgccgcgccgcgccgcgcccgccgcccgccgcggcggggcagcctgggactggtagtccgaccgccgggcgcgcgcggggcacgccggaagttgaagtctccgtccagctctcgcttcgcagaggcgctgactccagagacagacttcctggctgcaaactcccagctccgccacgaggaaacagcgttgggttgctttctagtacctgtttccccacttagagaacctcaaaacgtgttcaaagaaccagacacaaaaggccatatagggccgggcgtggtggctcacgcctgtaatcccagcactttgggaggccaaggccggtggatcacttgagaaaagaatttcgagatcagcctggaccacatagggagacccccccacaccatctctactacggaggcgcgcgccggtaatcccagctacttgggaggctgaggcaggagaatctcttgaacttgggacgtggaggttgcagtaagccaagatcgcggcactgcactccagcctgggcaacaatgagaaactttgtctcaaaaaaaaaaaaaaaaaaaaaaaaaagccatatagtgtacaatgccactgatataaaatgtccagaagaggctgtcaaggagtatgaatttcaacaaattgagtttaatgatctcattggctcttattagcaattcatgaattggatagcattcaatctattaaataggcactccaatgagctgagcagagaggatgggcattctgcattacaggcagaaaaggctgaagaaaggagaaataagaattaaaataaaagccaggccaggtacagtggtttgctcacgcctgtaatgccagcactttgggaggcggaggtgggaggatagcctgagcccaggagtttgagactggcctgggcaacatagcaagaccccatttctaaaaataaaaataaaaaaattagccaggtgcagtggctcacacctgtattcccagcactttaggaggccaagccgggcagatcatgaggtcaggagttcgagaccagcctgaccaatatggtgaaatcccgtctctactaaaaatacaaaaattagccaggcatggtggcacatgcctgtagtctcagctactcgggaagctgaggcaggagaattgctttaacccgggaggcggaggttgcagggagccaagattgaaccactgcactccagcctaggcaacagagtaagactccacctcaaaaaaaaaaaaaaaaaaaaattagctgggcgcctatagtcctaggtatttgggaggctaaggtggcaggattgtttgagcaagagaggtcaaggttgcagtgagccctgatcacatcactgcattccagcctgggtgacagagtgagagtttgtctcaaaaaaagtaaaaataaaaatacgaaataaaaaccaattggttgtttcaaagttacttttttcatagggtctgttttaaccccctctattttgagggtacttccctatcaggttaaccggtcccctttggcttggtggctgtgaatgtttttttttgaaaacctgcaccctttaaagttcagtttgaggccaggtacgggtggctctcacctgtaatctcagcactttgggaggctgagatggggagatcgcttaagcctaggagtttgagaacatcctgggcaacatagtgagactctgtctccaaaaaaaaaaattttttttttttggagacagagtcttgctcttgtcacccaggctggagtgcaatggcatgatctcggctcactgcaacctccacctcctgggttcaagcaattctctgcctcccgagtagctgggattacaggcacccgccaccatgcccagctaatgtttgtatttttagtagagacctggtttcaccatcttggccaggctggtcctgaactcctgacctcgtgatccacccacctcgacctcccaaagtgctgcagttacaggcgtgagccacggcacccagccaaaaaaatttttaataattagccacatgtgctggcacacacctgtagtcccagctcctcgggaggctgaggcaggagaatggcttgcatccaggagttcaagtctgcagtcagccatgattgcgccactgcactccagtgtgggcaacggagcgagaccctatttcaaaaaataaaaaaaataaaagatcagtttgactacgtggtacctggcactagtgactccattccaattttatctggtctgctggggactagagaccccattgtctaaaacaatggcctgccatacattttatttaacaaggccaggcgcggtggctcatgcctgtaatctcagcactttgggaggccgaggcgggcagaccacctgaggccaggagttcgagaccagcctggccaaaatggcaaaaacctgtctctccaaaaagtacaaaaattagccaggcgtggtggtgtacgcctgtaatcccagctacttgggaggctgaggcacgagaatcgcttgaacccaggaggcaaaggttgcagtgagctgagatcacaccactgcactccagcctgggcgacagagcaagactccgtctccaaaaaaaaccccccaaaattgtaatttaacaagacaacctatacagcagtgtttctccaactctgcactagatatttggggccagatcactctctgttgcagggggttggagtcaggaggtgctgtccattacagggtattgagcagcatcctcggtctccacccactccatgccacgagcatcccagcctcatacttattttttattttatttttatttttagttgaggcgggtctcgctctgtggcccaggctgcagtgcagtggcgtgatctcggctcattgcaacctccgcctcccgggttccagcgattctcctgcctcactctcccgagtagctgggattacaggcacttgccaccatgcccggctaagtttctgtatttttagtagagacagggttttgccatgttggccaggctggtcttgaactcctgacctcaaatgatctgcccgccttggcctcccacgttgctgggattacaggcgtcagccaccgcgtccgaccccggccccctagttatgaaaaccaagtatgtctccagagattgccacatgtcaccagaggggcaaaattgccccaattggagaataacttcctcctgacctagaactggcccggtcttccttctgcctggggaactcctcctttttacacatctcaccttgggggtttggctcagcctctgccagagaccccagtaaatcacacactgagaatctaatgccctttccagcctactgaggacaccaggggaaagagcccacctgcctccaacagccaacattcactcgctattattcccctcttaccagatagacccccagccttagaacccaggcaggaagcctggcatggtggctcacacctgcaatcccagccactctgggaggctgagacaagaaaatggcttgagcccaggagtttgagaccagcctgggcaacatagcaagacccaactctacaatactctacagttttttttttttttttttttttggagacagagtctttctgtcccccaggctggagtgcagtggcccaatcttggctcactgcaacctcctcctcctgggttcaagagattctcctgcctcagcctcctgagtagctgggatgacaggcatgcgccaccatgcctggctaatttttgtatttttgtagagtttcctcatgttggccaggctggtcttgaactctggacctcaagtgatctgctcacctcggtttcgcaaagtgctgggattacaggtgtgagccactgcacccggcccctacaaaaaaatttttttaattagttggtcgtggtggcgtgcatctgtatccccagctacttgggaggccgagtcaaggagatggcttaagcccaggaggtggaggctgcagtgagctatgattgcaccatttcactccagcctggatgacagcgcaagactctctctctctttttttttttttttggcaggggggacagggtctcaccctgtcacccagattgcagtgcagtggcttgatctcggcttactacaacctccacctcccagggtcaagtgattctcctgcctcagcctcccgagtagctgggattacaggcgtgcgccactacggcccagctaatttttgctagagacggggtttcaccatgttggccaggctggtcttgaactcctgacctcaaatgatccgcccacctcggccctgcaaagtgctgggattacaggcgtgagacaccgtgcccagctgcaagactctttctcaaaacaaacaacaaataaaccagccaggcaagagggagctaagcagtgactgcgtatttagaggactgatactgttttccttcctcataaagggaggaatataaaatataaagacagatggtaaagcacaatgggaaataaataatactacaggaggcggggccagaggggagaaggatgattgaggtttgggtgggaaatggggtcacttttttttttttttgagacagagtcttgctctgtagcccaggctgaagtgcacgatctcagctctctgcaacctccgcctcctgggttcttgtgattctcctgcctgagcctcctgagtagctgggactacaggcatgtgccacaacgcccggctaatttttgtgtttttagtagagacggggtttcaccatgttggaccaggctggtctcgaactcctgatctcaggtgatctgccagcctcggcctcccaaagtgctgggattactggtatgagccaccacgcccggccgggtcacttttcctattctccaccctcagactgatctgaaaccgcccccccgctccgcatcaacttctcactgaccaccggccttggccactggctgaccagatcccccaactagccccttactggaggccctgcggggtcccgcccccaaccccatcgcgctgcccctctgggcacttccatccccacatacccccatacccagcctttgcccgtgctgttccatccgccaggagcgccgtttcctgcctgactgcgcggccctgggcctcagtcttgcgctctgcaaaccggggtctcgaatctaccccagccctcctgtctcggcgctggggaggggcttcgggtgcccagagccatccccgcgggacccccagggactggactccaagtcccagaaagccccgcgcttcccgtgggtggggcccggggctttccccctcccagcgcgcagtttgggaggcgctgggcaattttcaaattttggcgccgaacgggaggggcggtgacagctgagaccgtggtccccccgggggcacccacgcccaggctgctgctggcagctgcgcccagagcccgaggtctggggcatcccgcaaagctgccccgtccattccgaggggcctcccaaggcaccacacgcgccagggggctccgggcccatttccattatggaaaactgaggcacaggaaggttagggaccggtcggggaatccgcaccaggggcgtagcggaggcgggattcgaacgcgggaccctctttcccccgggagctagaaattagtgaccaattggctgggcgcggtggctcacgcctgtaatcccaactttgggagtccgaggcgggcggatcacctgaggtcaggagtgcgagaccagaatgaccaccatggcgaaaccccgtctccacttaaaaaaaaaaaaaaaaaaattagccgggcgtggtggcaggcgcctgtgaccccagctactcggaaggctgaggcaggagaatcgcttgaacccaggaggcggaggttgcagtgagccaagatcgcgccattgcactccagcccgggctacaaaagcgaaccttcgtctgaaaaaaaaaaaaagaaaagaaaagaaaagaaagttagtgaccaactgctgtctgcttttggggagagggtacggggccgcgggagagaaatcccggaccctgggactatgcagcccgtgagggccccagtcccgacccgtccattccactgacctccacccggcaccgccactcccacccggggagtggattttggcgccagattttaaaaatctcagcctaacggctgtggctggctcccagcccggaatgcgagcctggagcccggattccggaacctggatctggaggagcccggattccagagcctggttctgagggagctcggattccggagcctggatctcggggagcccggattccggaacctggatctgagggagctcggattccggagcctggatctccaggagcccggattccggaacctggatctcagggagcccggattcggagcttgggtctgagggagctcggattctgaagcctggatctcggggagcctgaattctggagcctggattctgggctgtgggtcttgggaagccgaattctggaacatagattccagaacttgaaggccaaacctggtatctaagatcagaattcaggaccctggagttggaaccttgtgaccccaacagaaatccgggaggcaagcagagctctggggccgtggctggcagctgcctgttaaatgagtgaatggaacagtgaaatcaacacatatttgcgtggcttctactttgtggcaggcactggggggacagaggggaagcgagtacacattataaataagtgaattaggtagggcgcagtggttcacacctgctatcccagcatttagagaggccgaggcagaaggattgcttgaggccaggagttcgagaccagcctggacaacatagtgaaagcccatctctacaaaatatacaaaaattagctaggcgtggtgactcatgcctgcagtcccagctacttgggaggctcaggtgggaggatcacttgagcccagaaggtagaggctgcagtgagcagagattgagtcactgccctccagcctgggtgacaagagtaagaccctgtctcaaaaataaataaatagggctgggcttggtggctcacacctgtaatcccaacactttgggaggccgaggcgggcagatcacctgaagccaagagtttgagaccagcccagccaacacagtgaaaccctatctctattaaaaatacaaaaattagccgggcatgagggagcacgcttgtaatttcagctacttaggaggctgaggcacgagaattgcttgaactcgggaggcggaggttgcagtgagccgagattatgccactgcactccagcctgggtgatggagtgagactctgtctcaaaaataaataaataaataaataaataagtgaattgtatggcatgctagaggatggtgagcatgaggaagaaagaaagtggggtaaatgctggggcatgtgtggagtaggggtagaggtgggcctcttagaaaagggcaagacagggtctcgctatgttgcccaggctggtctcaaactccttggctcaagtcatctgcctgccttggcctcccagagtgctggaattaccggcatgagccaccgtgcccagcttatattcacttttcttatctcacagtttctgtgggtcaggaatccagatgtggcttaactttggcatcctctgtctcagggctctgaaaggtggcaaccaaggtgtctctggggcagagtccacttctagactcactcacacgtggtcagaaggattctgttccttgcagactgttagaccaagagcctcaaatcctggcccactgctgtccagggcctgcctccgttcatcaggaggagctgggggtgaattagtcagggttctccagagaaacagaaccagcaggaggggagagagaataagagattttttttttttttttgagacagagttttgctcttgttgcccaggctggagtgcaatgatgcaatctcggctcaccacaatctctgcttcccgggttcaagcgattctcctgcctcagcctccccagtagctgggattacaggcatgcgccaccacacctggctaattttgtatttctagtagagatggggtttctccatgttgattaggctggtcttgaacttccgacttcaggtgatccgcctgccttggcctcccaaagtgctgggattacaggcgtgagccaccacactcggccaagagatttattataaggtattgatgcacgggggctgacaagtcacaacatctgaagtctgcaagctggagacccaagagagccgatgttcctttttatttttattttttttgagatggagcttcgctctgttgccccagctggagagcagtggcatgatctcggctcactgcaacctctgcctcctgggctcaaatgatcctccccccttagcctcccgagtagctgggattacaggcatgcgccatcacgcccggctaatttttgtatttttagtagagacagggtttcaccatgttggaaaggctggtctcaaactcctgacctcaagtctcctgcctcccaaaatgctgggattacaggcgtgagccaccatgcccggctgagagctgatctttctgtttgagtctgaagacaggaaaaagctgatgttccagtctgaaggccttcaggtgggaggaattctctgctccccaggggagtggcagcctctgtattccatccgggccttcagtgaattccgcaaggcccacccgtgctagggagggtagtgggtttgagtgactcagtgagtctactgatgcaaagggtcaaaggctcatctcatctaataaccccctcaccggcatgcacagagtaatgtttgaccaaatatgcaggcacccacagcccagccatgatggcatataaaattaaccaccgggcggggcgcggtggctcacgcctgtaatcccagcactttgggaggctgaggctggtggatcacttgaggtcaggagttcaagaccagcctggccaacatggcaaaaccccgtctctactaaaaaatacataaattagccaggcgtggtggtaggtgcctgtagtcccagctactggggaggttgaggcataagaatcacttgaacccatgaggtggaggttgcagtgagccaagattgcaccactgcactccatcccgggtgacagactgagactgagattctgtcaccaaaaaaaaaaaaaaaaaaaaaaaaattaagcatcatacagccgggtgcagtagctgctcatcctgtgatcccagccctttgggaggccaaggaggaaggatcgcttgaggccaggagttcaagaccagcctgggtaacagagcagggccccatatctacaaaaaataaaattagctgaaagcgcctttgcaaaagttctatcagtgagaaaaaaaaattttttttttttgagacggagtctcgctctgtcgcccaggctggagtgcagtggcacaatctcggctcactgcaacctccgcctcccgggttcaagcgattctgctgcctcagcctcccaaatagctgggactacaggcacgcgccaccatgcccagctaagttttgtatttttagtagagatggggtttcaccatgttggccaggatggtctcgatctcatgacctcgtgatccgcccgccttggcctcccaaagtgctggaattacaggcgtgagccaccacgtccagccgagaaaattataacagtaggctaaactaactaacccccatcttgccttaattattcctgggctattgggcccagctaacttgggaagacatttaggctacagtttaagtgatagtagaccttgcacaaaacccaacagcttttgtcaagctaacctgaggccttcaggttgagggaggaggggagcctgacatctgttaaggtgcaaacgttattctggaggttataagatatgcagcttccaggccaggtgcggcggctcacgcctgtaatcccagcactttgggaggccaaggcgggtggatcacttgaggccaggagttcaagaccagcctggccaacatggtgcaaccccatctgtactaaaaatacaaaaattaaccaggcttggtagcccatgcctgtagtcccaaatacttgggaggctgaggcaggagaatcgcttgaacctgggaggcagaggttgcagtgagccgagatctcaccactgcactccagcctgggcgacaaagcgaaactcagcatgcaaaaaaacaaaaaaaaaacaaaaaaaaaacaaaaaaaaagagatgtggttcccccaattactcctgcaaataacaccattattgtagtttggccttttgagatgtctttccacgtgttttgcatgtctgacacccgtggctccacctggactgacaaccctgctcctgaggttccacacagaagcgatctggccggcaggaggacccctgcaacctgctgtgagtccatctctgcccccaaccaaccagcagcaagcacctgtttacctggcccactcccactccttcccacaaaactgcccttgaaaaacccctaacctaggctgggcgtggaggctcacgcctggaatctcagcactttgggaggctgaggtgaacggatcacctgaggttaggagttcgagaccagcttggccaacatggtgaaactccatctccaccaaaaaaaaaaaaaaaaaaattagctggatgtggtggcgtgcacctgtaatcccagctattcagaaggctgaggcgggagaacctcctgaacccaggaggcagaggttgcgaattgcttgaacccaggaggcagaggttgcagtgagctgaggtggcgccactgcaccccagccttggtgacagagcgagactcgtcgcaataaagaaaaacctctaacctatgaggtttgaacaagttgatttatgaattccatctcccacgtggcgtggccagcctcatgtctattaaactctttctctactacaatgctgtggtctctttctctttcgttgtttcctttcttttcttttttttttttttgagacagtctcaccctgttgcccaggctggagtgcagtggctcaatctcagctcactgcaatctccgcctcccgggttcaagcgattctcctgcctcagcctcccgaatagctgggattacaggcgcccgccaccactatgctcggctaattttgtatttttagtagagacggggtttctccatgttggccaggctggtctcgaactcccgacctcaggtgatctgcccacctcggcctcccaaagtgctgggattacaggtgtgaaccaccgcgcccagcctctattttttttttttttttaagtaaaatactttgttagactgggggtctccctatgttgcccaggctggtctcaaactcctggactcaaggaatcctcccactttggcctcccaaagtgctgggattacaggcgtgagcccctgcacccagtcacgtggtctttctttatgcagtgggcaggaagaacccctgcatagcggggtgtggtggcccatgcctgcaatcccagctatttgggaggctgagatgggaagattccttaagtcaggagttcaaggctgcagtgagctgcgatgtcactgcattcaagcctgggcaatagagcgaagcccatctctaagaaaaaaaaaaaaaaaaaaattaaccaccctgggggatcactggagccaggcccgaagctgcccaccatgctagcattgtctgcaatgcctgctgccgggggttccagctgttccgatgtctgtgagcaagtgtgtaagttgtaaaatactcagtgcaaggcgaatgattcctgtccattgtgtagcaagaaattttgcctcgaccagagagagatctggcttttgtttcagccactgggaggtgactcttaggccccaggaatgtcctgcctgatggatataccgttctgttttttttttttttttgagacagagtcagagtctcactctgtctcccaggctggagtgcagtggtgcgatctcagctcactgcaagctccgtctcccgggttcaagcgattctcgtgcctcagcctctcggagtagctgggattacaggcgccttccgccacacccagctaatttttgcatttttaggagagagggggtttcaccatgtgggccaggctggtctcgaactcctgacctcaagtgatccattcgccttggcctcccaaagtgttgggattacaggtgtgagtcaccgcgtccggcattcgagtggctttcgaggtcactacagtaggggaggtgtacggagcactttctatgccaagcccattctaggtccttgttttgggtaaacatttccacaacctgacttttcccatgaaaagagggagtttcagggaggctaagccaccaacccaaggacacacagctgatgacggctgcaggtgggatttgaaccaggcaaacgtgacctcagacagagcctctccttctccctctctctgcgaggcatagtcccagacctgccagcctcttgctgtgcacagtttccctgcccctcccctgccactgtcctcagaatttcccaaatgtgcctcagccttcgccgtagcctccgctgccacctggcgtggtgatcccacctcctcccaccccaggcctgtcttacaaatgtctgcaagttcaaatgatgactcagctccatcccgaaacctctccttggggacaggagtcatgtcttgctcgttttgttcatctttgcagaaaaacatgatgtcagagcccagccgctgccaatcacttcctggctacatccggagtgacacgcagacccctccccgcagcccccaaagcccgtctctgtgagctcatcttcccggctctccctcttgcttactctgttccacccccagggcctccttgggattcctcaaatgcaacaggtgaggtcctgcgtcagggccttttcaaacactgtgcctgctgcctgggacctctgcccccagagccccttgaacctgactttttaccgttttttttttttgagacagagtcctgctctgttgtccaggtggggtgcagtggcatgatctcggctcactgcaatgtctacctcccaggctcaagtgagtctcctgactcggcctcctgagtagctgggattacaggcatctgccaccacgcctggccaactttttgtatttttagtagagacggggtttcgccatgttgtccgggctagtctcgaactcctgacctcaagtgatctgccctccttggccttccaaagtgctgggatcacaggcatgagccactgcacccagcccgcccccacttttttttttctttttgaggcagggccttgttttgtcgcccaggctggagtgcagtggtgcgatcatagctcactgcagcctcaaactcctgggctcaagtgatcctcctgctttagcctcccgagtagttgggactacaggtgtgcccatcagacctggctaatttttaaaaaattatttgtggctgcgtgcggtagctcacacctgtaatcccagcactttgggaactcgaggcgggtggatcatgaggtcaggagtacgaaaccaacctggccaagatgtgaaaccccatctctactaaaaattagccgggcgcagtgtaatcccagctacttgggaggctgaggcagaagaatcacttgaactcgggaggcagaggttgcagtgagctgagattgtgccactgcactccagcctgggagacagagagagacttcgtctcaaaaaaaaaaaaaaaaaaaaaggccaggcgtggtgggtaacacctgtaatcccagcattttgggaggccgaggtgggcggatcacgaggtcaggagatcgagaccatcctggctaacacggtgaaaccccatctctactaaaaatacaaacaattagccgggcgaggtggcgggcgcctgtagtcccagctactctggaggctgaggcaggagaatggcgtgaacctgggaggcggagcttgcagtagccgagatcacaccactgcactcctgggtgacagagcctgggtgacagagcgagactccgtctcaaaaaaaaaattatttgtagagatgggagtcttgccaggttgcccaggctggtctcgaactcctgagctcaagcgatcctccccacttggcccccaaggggctgagattacaggcatgagtctacccttagagacagaggctgcacgaagtcatgatcacaccactgcactccagcctgggcaatacagggagaccttgtctcaaaaaagaaaaagagaaaggaactaatctcattagaagactccactctcatgagctcatctgaccctaatcacttcaaagcccccccgcaacaccgtgcccagcctgcagtacgtttttttattttttatttttatttacttatttttttgagatggagtcttgctctgtcacccaggctggagtgcagtagcgcgatctcggttcactgcaagctccacctcctgggttcacaccattctcctgcctcagcctcctgagtagctggcactacaggcgcccgccaccacgcccggctaattttttgtatttttagtagagacagggtttcactgtgttagctgggatggtctcgatctcctgacctcgtgatctgcccacctcagcctcccaaagtgctgggattacaggcgtgagccaccacacccggccacattttttttttaactctgaatgaatgcaaaaacctctatgctggataaaattttaaaaatttattttgtttaaagccaaatacggtgactcacgcctgtaattccaacactttgggaggccgaggcaggcagatcatttgaggtcaggagttcgagatcagcctggccaacatggcaaaaccctgtctctactaaaaatacaaaaaattagctaggtgtggtggagggcgcctgtagtcctagctacttgagaagctgaggcaggagagtcacttgaacccaggaggtggaggttgcagtgagctgagattgcgccactgcactccagtctgggtgacagagcgagattctgtctaaaaaaaaaaaaaaaaaaaaagattatgacaggattactcatactgattattcctctcacctcaggctccaagatggcctcggcgacactgttattgatctcattttttattttattttatttttagacacagggtctccctctgttgcccaggctggagtgcagcgacacaatcatagctcactgcagcctcaaactcccaggctcaagtgatcctcccacctcagcctctcacgtagctgggactacaggtgcgcaccaccacggtcggctaatttttaaaatttttgtagagatggggtctccctatgttgcccaggctggtctcaaactcctgggctcaagcaatcctcctgcctcggcctccaaaagtgctgggattacagaggtgagttctggcgcccagcccaaagataatagcacacatttcctgagtgcttacctgattctgggaatttcctccttcaatgcctgtgatgaagcctttgtgtgactgttcccatcttacagagaaagaaactgaggctggagctcattttctttttttttttttttttgagaaagagtctcactcttgttgtccaggctggagtgcagtggcacgatctcggctcattgcaacctccacctcccgagttcaagcgattctcctgcctcagcctcctgagtagctgggactacaggcatgcgccaccatgcctggctaatttttatatttttagtagagatggagtttcaccatgctggccaggctggtcttgaactcctgacctcgggtgatccacccgcctcggcctcccaacatgctgggattacaggcatgagccaccacgcctggcccggctggagctcattttctgagctcaaaggcacagagctcagagtctcttgaagatattccaagatactccagatattctaagatgcctggagccagggctggaaaaaggaggcacaggtgggcttggggtctagaaagagaagcctggagggtggaggaccatgggggtccaggcagtcagtctgggagaaaacaaggccaagtcagtgttgacagaggagtagggttttcctgctgaagaccagaggaagacagcatcccaggcggaggaaacagctgacaaaggctgggcctctcgcagaggaggttgttatggctggcacgggggacacacggaagaaggacttggacacatattctctgaggccctgctttgctcgccttattttatttattttatttgctttatttttgacacagtgtctcgctctgtctcccaggctggaatgcagtggtgcaatctcggctcactgcaacctccacctcccgggttcaagcgattctcctgcctcagcctcccgagtagctgggattataggcatgtgccaccatgcccaggtaatttttgtattttttgtagagacggggtttcaccatgttggccaggttggttttgaactcctgaccccagatgatccacctgcctcagcctcccaaagtgctgggattacaggcatgagccaccgtgcccagcccttattttatttatttatttgagacggggtctcactctgttgcccaggctggaatgcaactgtgcaatcccggctcactgcagccaggaacccctgggctcaagtgatcctcctgtctcagcctccggagtagctgggtgcacacaacacaccccattctttctttcttttttttttttttaaagactgagtctcactctgtcactcaggctggagtgcagtggcacgatctcggctcactgcaatctcggcttactgcaacctctgcctcccaagttcaagcaattctcctgcctcagcccccagagtagctgggattacaggcatgtgccaccacgcccgactgattttgtatttttagtagagatggggtttctccaggttggtcaggctggtcttgaattcccagcctcaggtgatcctcctgcctcagactccccaagtgctgggattacaggagtgagctaccgtgcccggcctttttgtttgtttgtttgtttgtttgtttgttttggggaggatggagtctctctctgtcaccatgccatgtgcagtggcatgatctcggctcactgcaacctccacctcctgggttcaagtgatactcctgcctcagcctcctgagtaagctgggattacaggcgcgtgccaccacgcccagctaatttttgtgtttttagtagagacagggtttcaccatgttggtcaggctggtctcgaactgacctcacgatctgcccgcctcagcctcctaatgtgctgggattacccagcctgcaatactttttaaaaatcaaaatcaatgcccaagtatccatgaggaacaaaatatcaaaattgtaaataaagacagaatctgactttgcacttatcccacccacctccctgatcttccttatcttcagctcatgttggccatgttggtcaggttggtctcgaactcctgacctcagttgatccgcccgcctcggactcccaaagtgctgggattacaggcgtaagccaccgcgcccggccgatttaacttttaaattgaaattataaaatataaatatgtatgttgcatgcgtaaaacattgcataaagttacataaaacgttgcaaccgccacggtccccttatcccccgcctccagcccagtgccccgcccgtccgtccctctcttccggcgctgagggcgcagaaactcggcgcggccaccagatggcgccaccgcgcctcgcagccccgggacatttcgtgccccagcggtgggcggcgcggaggaggtgggatgcgtcagccggacccgcgggccggggagccgggcaactggggaaagtgagccgccgggcggaggccagaccccaggctggcgggggaggggactcagatgtgagtcacccgggagcccccagtcgaccgtgggagacgttgtcatgcggggcctgccagcctcgctcctgaacagccttcccggggcggcggagtcctgcaggcggccgtgcctggcgcacacgcgtggctccaacacgaactagcctatggcctcaccaagcctcagtttccccttttgcataatgcacataagcatcccccctgcttcccaggtcttggattaaatcatccatgaatccggaggggtggggggtaccaggtccgcaccacgcactcaatgcaggtcagcgcccaccccggagtgagaaataaaagtagccgtcatccttgcacgtgggccctgggtggcggcgtgcagccggagcctgcaccattcccctcaacaatggctttctccagggcctggaggcctccgcacgggcaaaggctggaacgccaggcagccggcgggggcggggccgcgccacctgcacctcccacgcgcaccccaccctgatactcgcggggtcggcgaggaggcgcccactttcttctccagagcgccccgggctttgcaacctcccactttcggggccctcgaggaggcctcccgcgaccaccaggtgacagctgatgtgtattgggctcttactgtcagccgtattttatgccatgctctgcaaaccagcgaggccggcgctgcagacccattactcagacgggaacagagaggccgggagaagcgaaatcacccaggggctggggtcgtcgcagccaggagagactccggccctcaccaccacctgggcgagatcacgctgcaaacggggccccttcccggtgcagcccctccacccccagcagaacttgggaaaggcgcggtccgggactctccgcggatcgggaggggattccaggcccccccgaaagtccgggccgcctcgcgcgctggaaatcccgcgcgcgccccgaaccgcggctcggctgccgggaaatcaggagaaaaaaacttctgcttttttttcttttctggcattcgcggtcacctacccggcccccgcgcgccctcctcccggttctcgcccccacgtggggcgcccccgcacgccgctcctccccctcccctccgtcggccaaccgcagagctagctgcactcgcccttgtctttccaccaataggaggggcgaatgactccactgaggccacgcccaatgttcaagtctataaaagtcggtgccggaggctcccagctcagatcgccgaagcgtcggactaccgttggtttccgcaacttcctggattatcctcgccaaggactttgcaatatatttttccgccttttctggaaggatttcgctgcttcccgaaggtcttggacgagcgctctagctctgtgggaaggttttgggctctctggctcggattttgcaatttctccctggggactgccgtggagccgcatccactgtggattataattgcaacatgacgctggaagagctcgtggcgtgcgacaacgcggcgcagaagtaagtagccggggctgccgccgcctgaggtcagccgggacgggatgggtcgggttgggccgggccgggagcggaacgtagcacccggtggtccgcccgtcactgatccctctttcctggtctcaggatgcagacggtgaccgccgcggtggaggagcttttggtggccgctcagcgccaggatcgcctcacagtgggggtgtacgagtcggccaagttgatgaatgtgtgagtcagacccccttcccgggctgggcgcgggtgggacgggacctcccctccgctctggacgctttccgcacgcttgtcttgcatggagctgggacttccccaagtgccccccgctgtggatgcagagcttctctgccgttttgtggatcgggggctgccgtatcctgatgtatcgtctgcaaacacccctcccgccgtgggcctgtctccccctaccccatactttgaaccgtgtgccctcccctccccccaccgtcaccagcttgcagaggcaatcccctgcacccttgcagtttctcttttgctcttgcacgctccttttttgcaaactccccctgcacggtggcccctcccctgtccccggctgacccatccctaccctttggccccctcagggacccagacagcgtggtcctctgcctcttggccattgacgaggaggaggaggatgacatcgccctgcaaatccacttcacgctcatccagtccttctgctgtgacaacgacatcaacatcgtgcgggtgtcgggcatgcagcgcctggcgcagctcctgggagagccggccgagacccagggcaccaccgaggcccgagacctgcattgtctcctggtcacggtgagtcgggcctctgccctgccccgccacgcccgggcacctgggccggtgtttgtcaacaaagtcgggctgactggtcctgcacagctcagcgctcagccacgtttggcatgtcccgtgggcagccgggctggggcctcctcacccaggaagctattttgagcctgactgttttccccacacaggggccccgggagagggaggctccactaaaccccttcttttccctcctacagaaccctcacacggacgcctggaagagccacggcttggtggaggtggccagctactgcgaagaaagccggggcaacaaccagtgggtcccctacatctctcttcaggaacgctgaggcccttcccagcagcagaatctgttgagttgctgccacaaacaaaaaatacaataaatatttgaaccccctcccccccagcacaacccccccaaaacaacccaacccacgaggaccatcgggggcagagtcgttggagactgaagaggaagaggaggaggagaaggggagtgagcggccgcccccagggcggagatccaggagctggcggccgccgatccgatggagaaggggggacccaggccagcaggagacaggacccccgaagctgaggccttgggatggagcagaagccggagtggcggggcacgctgccgccttccccatcacggagggtccagactgtccactcgggggtggagtgagactgactgcaagccccaccctccttgagactggagctggcgtctgcatacgagagacttggttgaacttggttggtccttgtctgcaccctcgacaagaccacactttgggacttgggagctggggctgaagttgctctgtacccatgaactcccagtttgcgaattatagagacaatctattttgttacttgcacttgttattcgaaccactgagagcgagatgggaagcatagatatctatatttttatttctactatgagggccttgtaataaatttctaaagcctctggttgcttgtatgttttcggcttctagaacaactaggacccctgccccctccccggggacacgcttcaccccccacaacccccgccagctcaccaggaagtgttacttaagcccctgttagcagctccaggctcccgtgcagaaacagtaccccttctctccgcagcaggcgccgccaccgactccaacaaatctatgcctctttttttttttccttctcctcctaccctgcagcaattaagagaccggtttattacgaaacctggccgccgtgccaccactgttactggctgtgcaggagccaaccccaagctctgggcacatatggaggcatttcagcgggagggggtgctggctgcagcccctgaccgcctaggcggccaccgcagcccaaggtccggatcggtcaagggggcacctggtaccacacagcgaggtgagctcagggcttgcaaggaagagcgcttttggaggcttccccagggagtgcccccccagcccaccacagccttctccatcccaggataggcctctcttttgcactaaagaaaaaaactttttttatttccgcaaactaaaatcaacaagcagaaaaataccccaggaagtcggcctccgggccagccgggcttggcgcagtgctgcgttttgcctgtaaaccgaaactgcgagccctggccagccacctcctacttctcccaaagttgcaggcgcggtggtgactccccctgccccgggctgggagcgtggcccagcccttccgtgcccggcctcagtcttcccgccccgggtctgcagagtgggcccgccctggccaggcgccgggacgacctcggttcccctctgccctgcagcccccaagcctgggaactaggggggagtggggagggggtggggtggtcctgcccgcaggccgcgacctttccacggagcctcacgtgggcgcatgaggaaaaccccagcggctccctaggagtcacggggatcgggggagccccgacgggggagggagagagagaaggagggggaagtcccagagggagaagcggggaggggagaggatcccgcctggggctaggaggaggggagaactgaagtggggagaggggagcccaagaaggggaaggggaatcccccacagccctgaaccaacagggaaaccccgggaggggggtagacaggtaggagtcccgaaggggttgggggaggggagaatggaggcgaagaggcgggagccccgagggggtagggggtgatggagtggggatccctgagatggagcccaagaggggagggcacctgggaagagtgacagagggcgaggggctcttgagggattggggtgcgggagaacatgtggggccaaaacccaagggggctccaggtggggaaggaccaggtggggcaagggtgcgcctagcggcggcctggaaaagctctggcttttctttttctttcttttgagacagtctcactccatcgcccaggctggagtgcagtggcacgatctcgcctccctgcagcctccacctcctgggttcaagcgattctcctgagtagctgggaccacaaggacccactaccacacccactagtttttgtatttttagtagagatggggtttcaccatgttggccagactggtctcaaactcctgacctcacgcccgacttggcctgcaaaatgctgagattacaggtctgagccaccgctcccagtctctggctcttcgttggtcaacctcgtagggtagggaggcgaggccagctcggagggctatgcccccggggatcggatggtctgtctccatccggattgttccattcttgctcctcggtctctagaactgtgcagcaggatctcaggctcctgagccccaagtggagacagggcatggaggggccccagtggtgggaccctcagccaggaccttcacctgtctgtgcctcagtttctccctctgaaaaatgggggataatgctacctagctcatagattgttgaggaggttaaatgatatatagattcctgggccggccctgtggctcactctctgtaatcccaagactttgggaggcttgggggaggtggggaggaatccctgaacccaggagtttgagaccagcatgggcaaacatagagagatccagatctctacaaaaaaatttaaaaattagctgggcatggtggtgtgggcctgtggtcccagctacttgggagcctgaggcgggaggagcacttgagccctgaagattgaggctgcagtgagctgtgatggcaccaccacactccagcctgggtgacagagtgagaccctgtctcaaaacaaacaaacaaacaaacaacagaccctgaaatatagattccttgaccggcttccttcaatgtacttccagaatcatggttttttttccccaatttttaaaagatcattcatttaaaaattttagatttagctgggcgtggtggcttatgcctgttatggtttgaattgtcttccccacaaaagatgtggaaggctgggcgcagtggctcacgcctgtaatcccaggactgtgggaggccgaggtgggcggatcatgtgaggtcaagagttcgagaccagcctggccaagagggtgaaaccctgtctctactaaaaatacgaaagttagctgggtgtggtggcgtgcacctgtagtcccagctactcgggaggctgaggcaggagaatggcgtgaacccgggaggcggagcttgcagtgagctgagattgcgccactgcactccagcctgggcgacagagagagactccatctcaaaaaaaagaaaaaaaagaaaagaaatagggtctcactatattacccagtctggtctcaaattcctggccttaagtgatcctccagccacggcctcccacagtgttgggattacaggcgggagccaccgcgcccggccctctcctattgttagtactcttgcagttgttattgttgttgtcatttatgaaagtattccacggtctccctgaccgaagccagggaagtacaggaactggctttgaaggatgctgtttcattgaattaataatagcagctaggttgattcagtcttctctgggactcaactgtaaacacctataaacttactgtggccccgtgaggaagatgctgttgtcccatcttcccaaagaagagactgaggctcagaatggaggagccacagcctggctaggagtcttgaattgtcggtgtctggctggtcagtctctggggaaaactctgggttgagaggacccgggggatgcaacacccccagctccccagaccccttcaagttcacgctgggtcaggaaggagtagtcacagggcaccaagcctcagtcagctggcacgggccgttctgggctcccacactcaggactggatgccaggatacatgtgtgtattccttggacgacggtgagtggaagagttggcagtgcccaccgcaggttgcaggcagacacgcttcccaggccggactcgtgaagttgggtgcgtgctcaccccagggtgcccacgatggcctgtgtctgaacctacactcacaggctgaaacgcatacacacgctcacaccccgctatgcagtcatattcacagctggagacatggacatgttcacacgcacgcacacacatactgcatgccacggacacagagtcgcctgcaagaggacacatgagtccatagaaatgcctcccatggccgggtgtggtggctcacacctgtaaccccagtactttgggaggccaaggagggtggatcatctgaggtcaggagtttgagaccagcctggccaacatggtgcaaccctgtctctactaaaaatacaaaaaaattagccaggcgtggtggtggatgtctgtaatcccaactacttgggaggctgagacagaagaatcgcttgaacccaggaggtggaggttgcagtgagctgagattgtgccactgcactccagcctgggtgagagagagagactccatctctcagatgatccacctgcctcagcctcccaaagttctgggattacaggtgtgaaccacttcactcggccttattttttaattttttttcctttgagacagggtctcactcagttgtccaggctggaatgcagtgctgcgatcttggctcactgtaacctctgcctcctcagctcaaacgatcctcccacctcagcctcctgagtagctggggttacagacgtgtgccaccacgcccagccattgttgttttttgagacagtgtctccctctgtcatccaggctgaagtgcagtgatgtggtcatagctcgctgcagcctcaacctgctgggctccagtgatcctcctgccttggcctcccaaaatggtgggagccacacgcccagccactatctgctttttatagaaagagaatgtggagttcagataggtgcagtgacttgtccaaagtcacaaggtacaatggcagagccaggaaccaaaccaaggccagcgtggctcaaagtactgttttttcagacacacgcatgcacacacacacacacacatgcacacacgcatgcacacacacacatgcacacacacgcacacacacgtacacacacatacacagacatgcacacatgtacacacacatacacagtatatatactgtatatatgtacacatatatagtacgtatacacactatatataaatataatgatatatattattgagatatagttcatataccataaattcacccctttaaagtctttaactaagtggtttttagtatattcacaaaattgtgcaaccatcaccactattgaattccagaatattttcatcacccccaaaagaagccctgtcaccattagcagtcactcttcacgccccctcccccaacccctgacaaccgctactccacattttttccatgaattcacctgttctggacatttcatataaatgaaatcataaaatgtgcaaccttttgtgtctggcttcttttgcttgcacactgttttgggggctcatccatgatgttgtatgtatcggtatcaaagtttgaacatactggatgcagtggcggaggcctgtaatcccagtactttggaaaactgaggcaggaggattgcttgagcccaggagttcgagaccagcctgggcaacatggcaagacctcgtttctaaaaaaaaacaaaaacaaaaacaaaaattaagccaggtgtggtggtgcatgcctgtaatcttagctactggggaggctaaggtgggaggattgcttaagcctgggaggctggagctgcagtgagctgtgatcacaccactgcactccagcctgggcaacagagtgagaccctgcctcaaaacacaaaagatttgaacttgtgtggcctgccctgtgcctctgctccccagaacatgtgcctgggaatcccagcagtatactagcaccctcacgtgtggacggccatccctgggaaggcactcagagtcacacacacaattcgtatttagtgaccagccactatgtgtgggccttgcacatgcaaatcctcaacccacatgttgtttatacacctggctctctaacatccaaccagggcctgtgctgatgcctctggccagaacactcttccctacctttctcctagttaacacctactctccttttgctcacatctcagatgccacctcctccaggaagccctccaaacaagacctggaatgacctctgtactatctctgcccacctgcccttcttggtacttgcaccatttatttgtttgtttgttttttgagacagagtcttgctctgcccagcccctgcacccatttgtaatgacatatttataatcctgttatttgcttcttgtctatcttctgcgtgaagctgcagactcccagagggaggggagaaggtctgtttttctcacccccagatccctagtggctagcccagaacctgggacacaggcggcacttcataaatgcttatggcataaagactcagtcaagtctgtatgatgagaggttgaactgctgatgaccttctgtgtccatgctccagcacagacagtttcggccctaagggacacacgttgatctgccaggtgctgggtcctggccaggtagagtgacacctctcagctcaggaaggctggaacctggctctgtggaggaggccagccgcgtggcctcgggcaagttgcttcacctctttgcattcagttttcttgttggtgcaatggggatgccaatggtggtgcccatctctctcggggctgttgtgaacattaaattaattacattatgcaaagcatttagaacggggagaagcttgcagaaaagttagctattattagtgagctagtacaccatacaatgctttctgcctgtacatgaatatctgcatagctgcctgttaatgtgagttggaatttgtctctgaatctctgcacaccgcggtgtgttgggccatgaggacttgtgctgctatgtgggaacacagcaatatacgtacacgtgtggctgttgctacaattcttggcatccttggagtgagccctggacacccagaactcctgaccaactggggactcgtgattgcaccttcctcatcaccccaaataggaggtccatagctgctgatgctgctcacctctcccccagagtggccccagggcacgacctctgtggctggtggtttggaggtctatttattattttttgagacagtctcactgtgttgcccaggctgtagtgcagtggcatgatcatagctcactgcagctcaagcaattctcccacctcaacctcccaagcagctgggattacaggtgcctgccaccacgcctggctaatttttgtatttttagtaaagacagggttgcgccatggtggccaagctggtctcaaactcctgacctcaagtgatccacctgccttggcctcccaaagtgctgggattacagatgtgagtcaccgagccctgccattttttatttttatttttctaagagatggggtcttcctctgtcacccaggctggagtgcagtggtgctgtcacagttcactgcagcctcgacctcccagactcaagcaatcctcccacctcagtctccccagcctcccaagtagcgggaactataggcaagtaccaccatgactggctagggtttcactatgttgcctaggctggtctcgaactcctggcctcaggtgatgtccccatctcagcctcccaaagtgctggggttacaggcctgagccatcacaccctgcctgactcattcaatatttatttagcccctactgtgtgcgagggcctgtgttaggcttagaaaaacaagagagaacgagataaagagaggcatctgtgtgtatgggtgtgtgggtgtctgttgcgtgttgagtatgaattctcattcacgtttccagcatgcgtggccggaaagacttgggtgggtgtttttgtgtgaggatgttatggtttgaattgtgtcctccacaaaagatgtggaaggctgggcatggtaactcacgcttgtaatctcaacactttgggaggccaaggcaggagaatctcttgaggccaggagttcgagaccagtctgggcaacagagagagaccttgattctacaaaaaataaaaaaagatatggccgggcacagtggttcacgcctgtaatcccagcactttgggaggtcgaggtgggcggatcacaaagtcaagagattgagaccatcctggccaacacagtgaaaccctgtctctactaaaaatacaaaatttagctgagtgtggtggagtgcacctgtagtcccagttactcgagaggttgaggcaagagagttgcttgaacccggtaggcagaggctgcagtgagctgagatcgcgccactgcactccagcctgtcgacagagcaagactccatctaaataaaaaaaaaaaagatattagcctggcatggtggcatgtctcaaaaaacactgaaggaatcaaagcacacacccagggccacctggtctcagacacacagatgtgtgcatttgcatatcaaccccctattcatgggtgaacgtgcatctgcaatgacgcagtccagagcacagaaggaaagagacgatggtgcctccctgaagaggtccctgctgtgggcatctggggctgagccccgtagggaactgtgagaggtgtggtcacaatggggcaagacagccagtgggggcatctacttattttattttattttattttattttattttattttattttattttatttttgagacggagtctcactctgtcgcccgggctggagtgcagtggcgcgatctcggctcattgcaagctccgcctcccgggttcacgccattctcctgcctcagcctcccgagtagctgggactacaggcgcccgtcaccacgcccggctaattttttaatattttttagtagagacggggtttcaccatgttagccaggatggtctcgatctcctgaccttgtgatccgcctgtgtcggcctcccaaagtgctgggattacaggcgtgagccaccgcgcccggctattttattttgaggcacagttttgctcttgttgcccaggctggagtgcagtggcacgatctcagctcactcaggttcaaccgattctcctgcctcagcctcccaaatagctgggattacaggtgcgtgccaccttgcccggctaattttttgtatttttagtagagatggggtttcgccatgttggccaggctggtctcgaactcctgaccatgtgatctgcctgcctcggcctcccaaagtgctagattacaagtgtgagccaccgtgcccggctggcatctacttattaaccaactgcatcccccgtttgaggggtgttctggggtgttgactccctggtacttcctgcctacccagagggggttctcggtgagtgtctgtacgcaggtgggtgcctgcacacagtaggtgctgcatgtctctgggtgtctgcacacagtaggcatggcacgcaggtggggctctgcacacagtaggccttgcgtgcaataaagacgctgcacacagcaggtgtttgcatgaaggagaggggctgcacgcagtaggtttgcacactgttagagaaagaccccaggcaaagggacacgggaagccgttggactgtaggaaattgtcggaagccagctcccaggtggccaaggggacatagcagcatctgccatgcccttttgtgcactttaagcactggttctcagacttcagggtgcattggcaaccccctgggtacccccctttttttttttttaaatagagacaggatctccctatgttgcccaggctggtctggaactcctgggctcaaaggatcctcctgcctcccaaaatgcgaggattacaggtgtgagccaccatggccggcccctgggtacactttcaatgtggtgggttggatgttgtggcaggggaccctaaaccgggtctccccttttctaggacacagcagaaggaatgcagaggcttcctgagccgtcactcttccttactttctcccgggacccccttctctctgcagaccaccgccaagagcccagccctcagagccccagaactccctgcagcttcccagctctaggccttggcccctgtgatctccacctcgtggtcggggcagtgcccagccagggctccggggaggcgagggaggaaccagggtgggtctccttggaggaagcagagagtcacggagtcttgcagagagaggctcagagccctgcacgtcactttctccagcccccaccccagagcctggagcatgctccccggacatgtaggtcacgcgacccacagctttacagatccctagggatccaggagggacccccgagacccagaacgacccatagccacacagtgggaaggccaaggacctgctccccaggacgctgggccagggagaccgcaggcacacgggacagccacaccagagctgcatctggagaaggggtggggggtttcctctcgccgctcctcgctattctttccctacattgttccgttccgtgctcccagttcccaccccactccctccacccggacgccggcggttcccaggccccggagccggggtgcattgggggtgggggtggggtagagtgaggggcctcgtgaagagcgctgcgggccaagaccctcttgcgcatgtgacgagagcgcacgagtgtgggagcttcggcctgcgctcacaggcgtgtgcgtggggaagtgtttgggccgccgtgtacacagcaggcacgccataaacgcttcttggatggctccatgcgagggaagggagggagggcagagttcaggccctacagggaggaaaagggaggggcggaggcctggctttaggtttgaatctccgcggcttactagctccagcagctcagcaaaagcgtgactcagtttccctcgtccataaaagggaaagccgaatcgccctcccacgtgtcgaggtgaaactagacagtgcactaaggcacttagcaaaacgcgctgccttgagaacccttattacgccttccttccttccacctcaccccctggccagacactctgggggtggagaggggcgctgacccaggccccagacgcccctcccgtccgccctccctagcaggcaggagtcccggctttcccgttccttaaattggataattggagacagaggcgggtgctcgagacggagaaatccccaagtgggcgaaaggcaaggggcctgtcctagtttccctgcactgggggcccccaccctcgccagcgctccctccggtgcgccctgggcgcgcagtctgtgcgctcgggagcccccagcgccggctgtcgaccccctccagagcccggcggtgccagcctccctctgttgcccgccaggcgcggtgtctgcggccgccccggcaggaggggttggggggtccgggccggcggcagctccggcggcgtctccctcctccaagcccctggcggcgggcggccgggccgagggcggggcgtctgcacagaccctccttttgtgagcggcgccttccccgggcggcctggcgcgcagggctcgggcactgcgccagggcccggaatagcctccctgcccggccgcccgccccacgccccggcggagccgcctgacctgcccggtcgggcgcagaagagcctggggccgcggtggcacaggaaccgggtgcgtgctcagctgcacggggctgcagccgctactctccgctgggccggcactggacgcgtgcagccgggcctactgtgcgcagcccgtcttttgtgtgaaaacgcccgctgtgtgcagatctccgtcttcgtgcagggcctactgtgcgccgcaccccccttccatgcaaagcctactgtgtgcagaaccccatttgcctgcaatgcctactgtgtgcggcccctctcctgcgtgcaaacgcctgctgtgtgtgacccttttcttgcatgcaaggcctactgtgtgcagagccctaccttcttgcagtgcctacagggtgcagcccctctcctgcgtgcagacgtccactgtgtgcagatcgctgtcttcgcgctgggcttactgtatgcagcacctctcttccatgcaaagcccactgtgtgcagagccccacctggccgcaatgcctactgcgtgcagacacccagatacatacaaaaccgactgtgtgcaggcatccacctacatgcaaacacctgcacctgcactcgtgcaaacacccaccgtgcacaggcacccactgacaaacattcatgtgaggagcccccaagctcccacactcccaaacggccttgtctttttgtctttttttttttttttttttttttttaagatggaatcttgctctgtcgcccaggctggggtgcagtggcacgatctcaactcactgcatcctccccctcccaggctcaagcgattctcctgtctcagcctcctgagtagctgggactacaggcgcgcgccaccacgcccagcttgtattgtatttttagttttgtatttttagcagagatggggtttcaccatgttggccaggctggtcttgaactcctgacctcaggtgatccacttgcctcggcctcccaaagtgctgggattacaggggtgagccaccgtgcccagcctcatttttttttttttttttttgagatgaagtctcgctcttgtgccccaggctggagtgcaatggcgcaatctcagctcactgtaacctccacctcctgggttcaagaaattcttctgcctcagcctcccgagtagctgggattacaggcacctgccaccacgcccggctaatttttgtatttttaatagagacggcatttcaccatgttggccaggctggtctcgaactcctgacctcaggtgatctgcctgtctcagcctcccaaactgctgggattacaggcatgtgagccatggtgcccggcacaaacagccttgtccatgcaagcacaagcacccacatgtgtctaagaccctggtgtgcacacctgcactctgacctgcactgcgtgttcccactagggaaatgcaaatatttctaagctccaatgctcactccacagagccccgaggcctgtgaatacccgcggtatacagagatccatgaggtgccagtactcaaactgtggaagcctgcacgtgctgatttggggtgggagtagagtgcagggaactcatctgtgtgcagcccctttctctgggccctttgtgtgcacctcagtttaccccacctgggtaagagactctgccctgctggagtctcttctggttctgactttgaagggctccaaggtgtggggggaaagggggctgcattccctctctgctgtgtgcctctgggtggtggattcaggctagcagggctgggggctgggcctccaggcccttcccggaagcccgggaagcaggtgcaagggtaggcagtctccacgggcagggcgccagaccttggcttccctgaaactgggcacagcagctgggagaggtttccgggcccgcctggccccacctggcccctggcactttcggaagatgggcggggcaggcaggcaatgccaaggacgggcgaggcccagcctgcacaagagtcgccggtgaacctgtgcgcacacacgggtgtgcatgtatatgtgtgcacacgtgcatgggccatgctgatgtgagttctgtaccccacctacaaacgggtgtgctcatgaacacgtgcagggtcaccctggcacatgaaccgtgcagcacaggcaatggcccagcggtaattcacccatagcggtgacaggaaagagatgcttgtctgctttgctcactgtgcgtctccagcaccccacagctggttggcacttggtgaatatttgctgagtggacaaatgagtgaatacacgaacacatcattttgcaaatatgtactgaatgtctctactctgcataccagacatttgcacatcttcaaacaacaaaaagatcctgggaaacgacattctagacatccacggggtgggaataagcccacgcctgagagtacacactcatgtccaggaaacacctgagtccactttgatttgttcacctccagaagccagagcctggtgcccacacacaggccctcatgcagagacacgcattttctttcttttttttctttctttctttttttttttgagatggagttttgctcagttgcccgggctggagtgcagtggcgcgatctcggcccactgcaagctccgcctcccgggctcacgccactctcctgcctcagcctcccgagtagctgggactacaggcgcctgccaccacgcctggctaatttttcatatttttttagtagagacggggtttcaccttgttagccaggatggtctcgatctcctgaccttgtgatctgcccacctcggtctcccaaagtgctgggattacaggcgtgagccactgcgcccggccgcattttattttttcttttctttctttcttttttttttttgagatggagtctcgctccatcgcccaggctggagtgcaatggtgtgatctcggctcaccgcaaactccgcctccggcttcaagtgattctcccacctcagcctcccgagtagctgggattacaggtgcatgccaccacatctggctaatttttgtatttttagtagagacagggtttcaccttgttggtcaggctggtcttgaacccctgacctcaagtgatctgcccaccttggcctcctaaagtgctgggataacagacgtcagccaccgtgcccggccaggattttggacacacaaatatcccctctcttcccctgcaagcctacctgtgctacccaccccagccatcccctcctgaggtgtctgtccttccatgcctgaaggggttcatgggagtgtggggagtcctacaccccacctgtgattttccatcatttgagttctcctatggctcagaccattgcctgcaggaagctccagaaacagccagggttggtgggattagaactgcacaggtggggaggtgatgcccatataccctaagaaactatccttccatttcacagccggagaaaccgaggcccagagacaggaaggtcttcttgttgagctaagaagagaaatagagggatgataaacggatgccctgactgggccccctcaaccatctcctcttgcagccagaaacagtaggttcctaccgccaacaagggtggggacaggaaggtgggggaccagggtgggaggaggagatgggagtgaggccctggggggaggtggagcctatgtcctggagacagacacagaggtgggcggtccggagacacccacctcctcagacaggcacgggctctggcagctggtgacagagacacaatctggggcacataggcactgtctgtccctcctgccgccgatcttcctccccagcctctgatggggattctaggggctgctggggcccctgcaattgttttggcatgagtgtgcatacctgtgtgtttgtgtgttgggtgcacatgctttatttttattttcattttatttattccatttcatttcatttatttcatttcatttcattttttgagactgagtcgtgttctgtcacccaggctggagtgcagtggcactatctcaactcattgcaacctccgcctcccaggttcaagcgattctcctgcttcagcctccggagtagctgggactacaggtgcccaccaccatggccggctaattttttgtatttttagtagagatgaggtttcaccacgctgatcaggctggtctcaaacacctgacctcaagtgatccgcccacctgggcctcccaaagtgctgggattacaggcataaaccaccgcgcccggcctcactgagcatgttttgaaggcgagtgcgttcctcttgactgctgaactttcattctatgaaccgacctccgttgacctgttcccctctgaatggaggggtatttgagctcttcccaggttttggtgatgaggaacaaagctgctacgtgcatttacctcctggtctctgtgtgctcctaagttgtgtatttctttcagatagtaccaagagaagtgaggttgctgggtccccgtaaccttatagggtaaatactattattacatccactttgttgatcgggagaatagacgccgccaggcctcctgtctctcgctttcacacaaaggcacatacggcagacacggacccccatcactcatccatcactttcccatcactcaccgcagaccctccaggacccacgcagaaacccagggctcccccacggtgcacgcagcacccaggctgcccgccctccacccagggccgcgtcacgcccgacacccccggaacagacgcctatgaggcctgcagctccagacgggctgcagacacacagcgatttgttcatctttccagccaccccgtctggtcctgacagtaattagctcccagactggtggggagacggtgaacagcctgagagtcatcgcccacggctccacgcccacaggccacgggcaccgggagagagggtgaatgagtgtgtgtgtgtgtgtgagtgtgtgtgtccggaatctgtactctccagccagggctccccatcctcctgcaaagggccagcaccgtgcacgggtacccacggcgccttccaaggggaacgtgcacaggcatacccactgttcattccacgaaggatcgtgcacacgcatgcctacctttgcatttcacgcgggattgtgcacacgcatgtccaccgtgccttccacgcgggatcgtgcacacgcatgtccacgaactcctgcacacctacacccaccaggcctgcccatgcgatgcgtccctgcagacccactgtggacgcctgcttgtcggcgtcctgcgcatcccgcgtgagtggagtgtgcactcgtggagggggcgactgagtgcggggcaagcgcaagcgcaagcacactgggctcgcggagggtggagagaggccgtgcgcgttcccggggctggcgcggaggtggggtcagcggcgcgggagaacgccccgccccgctaccgccagcccggaagacccacggcggcgggcgctggcgtcacgggtttccactggggccccggcgccggggccgggattccctggcgcaggaacgcccgtgacggcggcgcctgcctgcgtcggccacgctgggaggtttgagcctggggatgacatcagcccctgcgtttctggagctggcccgggcgggacggggacttggagaaagcagtgacacccactttcgttgactgccaacccgtgcagagcgcttagtgcgtgtccgaccgtgagctgagcgctgtgatgcgggtgctgttaatgtcccattgcacagatggggaaactgaggccggcgcactgcccgccccgccgggcccccagagtgagggcccggggctgggagcagccttttcccagcgccctctgcagtgtagagtcccaccagcttgtctcccgctctctcctgcacaagccggctcagagagggtctgcgggtgtcctggcaccacccagcaagttgggtgctgcagccagctctgtccatacagttggtctctgcccagctgcggtggccaggggcggtgcctgagccagggcgcccgggcggcccggtggggtgtgcccagccgctgccttcctgctgacgccggtgccaagggatctaaatatagcctgggaggaggcaagggctatttttaacgcgagtggcttggcccctcccagttcccgggtcaggagccctttggtccaggattttggggaggggcaggggcgagggggagccaggggccccacacccgcctgggcctgcccctctgcccacacctggccctggaagactctaggggacgaagggccgtagagggagggcagggtgggggggctgtcgcaggtcacctttcttaaacgccacctcctctctagctgccgaccagccctggccttttgttgggcccagagactgctttctattttgggaaggtgttggaataatttccttggctatttttagccggttcggggattcctccactcaggctggccgccctgcctctcctcctcctcctcctcctcctagtcgtcttcctcctcccggcagacccaagggcggcctccttcatggagggcagtcagggacacacagtccctgagccagacccagaatggggagacccctatatttcctgggtcggggagggaagggagctctgaagggcgttcccacgttccaggtgagcaggactttcagacctctgggaatccatgacgccaggtatctgaattctgtctccagggcagggtggggcgacccagcagcctctgacctttcacctcctttcagggttgtcacaggaaagtggcctgctgagaacagaccttgactcccacatccctaggctaggggctcccatgttcccaagaggaagatcagtgtgatgagggtaaactgaggcacagaggggacactgggatgggacacatcttgggctcattccctgatggtttcatttccttccacattctacctttgtttttaatttttttttttgattgttttgagacaagacggagtctcactctgtcacccaggctggaagagtatgcagtggcacaatctcggctctctgcaacctctgtcctctgggttcaagcgattctccagcttcagccccctgagtagctgggattacaggtgcacgccaccatgcccagctaagttttgtatttttagtagagacggggtttcaccatgttggccaggctggtctcgaactcctgaccgcaggtgatccacctgcctctcctcccagagtgataggattacatgcgtgagccactgtgcctggcagcagcgccgtcatagcttatggcagccttgacttcctgggctcaagtgatgcccccaactcagcctcctgagtagtgaggcctatataggcatgtaccacgatgactggctaatttttgaaaatttttactagagatggggtctctctgtgttgcccaggctggtcttgaactcctgggctcaagtgatccttccaccttggcctcccaaagtgctgggattccaggcgtgagccaccgggaccagccctcatgctgccttttaacagctaagcaaccttggggcgatgacttcacctctatgtgcctctttcaggaaagggggtgacagtcacatggactaatggtaaataggtgagggaatatatgaaaggtcttagaacaagctcctggcagaatggagctgagggtcctggaaaggacgctgggatatggctggctgcaggacagaggaacatcccgggtgctggctggttccacattttgagaggacacacccccttacttatcccagtccgtgaggctggcgagagtgaccccggcgtttcagatcaggaaactgagaccctgggataatttcccaggcccagggtctcatgacagctgacacacaggaggccagcacagtcccctggctcccccgggccgtattccacagctgctccgcattctttcaccggtgccctcactcatgcagcaagcatttgtgagcaccgtatgagtttcctcccgctgctgtaacaaatcactgccaacccagtggctggaaacaacacagagttattatctgacaagtctggaggccaggaatccaaaatcagtctccctgggctccaaatcaagctgtgagcagggctgggccctcctggaggatccaggggagaacctggcttccacgtttgccagcatttagaggcagctgcttccctcagcttggggcctcttcctccacgttcatggctggccgtgcagcctcttccagtctctgactctcacctcccaccacctcttatttattattattattattattattattattaattttagtggagttttgctctttttgcccaggctggagtgcgatggtgccatcttggctcactgcaacctccacctcccgggctcaagtgattctcctgcctcagcctcccgagtagctgggattacaggcatgcgccaccacgcccagctaattttgtatttttagtagagatggggtttctccatattggccgggctggtctcgaactcttgatctcaggtgatctgcctgtcctggcctcccaaagtgctgggattacaggcataagccactgcacctggttgtttgtttgttttaagaaaaatctttttcactgtgcaagttgatttttttttttttaagagatagggtcttgctccatagcccaggccggagtgcagtgatgcaatcatagctcactgaagctgcaaactcctgggctcaaggaatcctcccacctcagcctcccgagtagctgggaccacaggcactcaccaccatgtctggctaattttttaaaattattttttgtagagtcggggtcttgctatgttgcccagactggtctccaaatcctgagctcaagtgatcctcatgtcttggcctcccaaagtgctgggattacaggcgtgagccaccacgcctggcccgcaagttgattttttatgagtatattgcttctctccaagggcggatggcctgaccgggataagacccgtgaacagatagtaaatgtgggtttggcatttggcaggaaatgcttgtggaattcaggaggcaactgtcatttatctgtcctgtatgccagctggatatcaagtacatttctgtatcttaagaccatcagccagttttatttattggatgcttattaagtacttaatgccaatttaatatcttcacagccaccttagtgctaataatcatcctcaccttacagatgaggaaactgacatggagccatgacttgtcgaaagtccccggccgggcgtggtggctcacgcctgtaatcccagcactttgggaggctgaggtgggtggatcatctgaggttaggagattgagaccatcctggctaacacggtgaaaccccgtctctactaaaaatacaaaaaataagccgggcgtggtggcgggcgcctgtagtcccagctactcgggaggctgaggcaggagaatggcgtgaacccgggaggcagaacttgcagtgagccgagatcgcgccactgcactccagtctgggcaacagagagactccgtttcaaaaaaacaaagaaagaaagtccctcagccaagttggtggcagaagctacccagccggttctgtttccatttggccttgctgctgcctcttgcttgaatgctttcagggaccatgcaggcacactcctcagctatccccttgttctggtcctccagcaacagtcttgggaagttagtgggttccacaatcctgagcccaagctcagtgcagctctcccaccctcaggtgtcttctgcaaacaaaggacctcccagagcccacggagggggaatgtttcgaaagtgtgctggccaggaaagagaccagacgtgaaccacacttcctccctccctctgctccagatgtctgcaccagaggtggtcgggaggaggctgccagatagacaagacaacaggagcgttggaaaagggcggcttccactactacctcccaatgtggggatgtgactggaagagcagctccatgacccaaggatgggactttggctttcttttatccccaagccagcccgtgacatgccttctgctagatggatggctgtctgcagctctgaccctgtagttttgcgcagattatctgtcccatgaaacgtttagactctggcctgagaattcctcctttcgtcttctttttttttttttttttttttgagacggagtctcgctctgttgcccaggctggagtgcagtggcgcgatctcagctcactgcaaccccccgccccccaggttcaagcaattctcctgcctcagcctcctgagtagctgggattacaggcacgtgcaagcatgcctggctaattttttgtattttttagtagagacagggtttcatcgtgttagccaggatggtcccgatctcctgacctcgtgatccgcctgcctcggcctcccaaagtgttgagattacaggcgtgagccaccgcgcctggctgagaattcttcctttctagaggccactgcatgtggccttcgaggggaggggtcgtgggacaggagtagttaccaaaggcagaacccttttagattcccctgattctcacagagtgggctggaggcacgtaaaccacctgataatgcaagccgggttttcctgaatgttctctggagtaggtcgctcatcctaggtgaaagcagatcttttccctaggatctgaggctttagacgcaggaattgtcactgccatttgctccagaatcccagtgctgctccgactgtaattgctcattttactgatcaattgagacagacaaatgcagttagaagacacagggatgacctctggaaggtccaagggaccagagtgaatgttgtcgccaaagatcctgtaagtgagaggcggagccggggccgagactggacacctgtcagcaagctcattcccccaacgacaccctggcctgtcttggcgtacgctggcagtctgcgttctgaacaggggagatgtttctttctcaaccttggcttggagttctccccagagtgataaatgttggcgagaaagagcggcacattcttttttttttttttttttagacagagtttcactcttgtcgcccaggctggagtgccacggtgcgatcttggctcaccacaacctccgcctcccgggttcaagcgattcttcttcctcagcctcccgagtagctgggattacaggcatgagccaccacgcccggctaattttgtatttttagtagagacggggtttctccgtgtgggtcaggctggtctcaaactcctgaccacaggtgatccgcccgcctcagcctcccacagtgctgggattacaggcttgagccactgcgtccggccaggagtggcacattcttagggccggctcacccgtgaggccctacatcactctttccactgtaaaccctgtggtggctgctacagatcagccacaagtgcagaaagcgctgaacccgacgcggccacccagggggagcccccatcccggagactttgctgtgccctcccaggcccctcgtgggattttttctcttttctttggatccctggcgggggtcggagagggtgtgggagggcgcagaataaaccctgagcctgcctcattggctgcctgggctccagagccctgccgttgcttgtggaggactttctgggaatcacgtggactggccagaagggctgggaactggagagcaggcaaggattctggaagaggggagatcccagtgggagggatttgaggctggcagtgggtcagagacagaagtccagatggacaggtttaaagtctctgcttaaggcggggcgtggtggctcacgcctgtaattccagcactttggcaggccaaggcgggtggatcacttgaggtcaggagtttgagaccagcctgggcaacatactgaaaccccgtctctactaaaaatacaaaaattagtcaggagtggtggcgagcgcctgtaatcccagctactcaggaggctgaggcaagagaatcacttgaacccaggaggcggaggttgcagtgagccgagattgcgccactgcactccagcctgggtgacagagtgagactctgtctcaaaaaaaataaataaaataaataaataaaaataaaagtctctgcttagataagcactatgcttctgctgcctgtaaatggctcttttaccctttctttagcatgaaaacaaattttctaattattataaacaaaatgtgtgcaatgtggaggctggctgttggtactcattatccttctcttgcttgacgtcaagtgaaagataaattgttgcctctggcccttcccaggaccaaagagaaggcacgacgtcaaatgcatctccttggatttgggaggcaatgtatacttaatttgggtgtgcttccccggcctggttgaggaggccatcgtgccctccctccatcagtctgcgctctgtggcatctgtggcgtggacccttctttgctttgcagaggcagagtgtctgcattcggcatcgtacccagcccagtccagagtttacagtaggggtcacccttggaggtctgtgttctgtgggttttacccaatgcatgaggttacatatccaccatgacagtgtcacatacagtaatttcactgctccccaaatcctctgtgctccacctattcacccttatccccgcttccttcaacctgggtaacccctgattttttttttttttttttttttttgatggagtctcattctgtcacccaggctggagtacagcagtgccatctgggctcactgcaacctccgcctcccgggttcgagcgattctcctgcctcagcctcccgagtagctgggattacaggcctgcaccaccacatccagctaattttgtattttcagtagagacagggtttctccatgttggtcaggctggtctccaactcccgacctcaggtgatccacccgcctcagcctcccaaagtgctgggataacaggcgtgagccaccactgatgtttttactcatgtatagctttgccttttgcggaatcttttctagttgggatcgtagcatggaggctgtgaaggctgcagcttctttcacttgtttcccggtgtattccagatttcaggagttattcgtacaactcggcttgtgacttcacatcactccagcctcttgtttctgttgttatgtctccttctctgactgaccttcctgccaccctcttacaaggaccctgtgatgacattgggcctacctggataatccagacaagatctctaattttttttttttttttgagacagagtcttgctctgttgcccaggctagagtacagcggctccatctcggctcactgcaacctctgcctcccgggttcaagccattctcctgcctcagcctcccaagtagctgggactagaggtgcccgccaccacgcctggcgaattttttgtacttttttttagtaaagacggggtttcaccgtgttagccaggatggtctcgatctcctgacctcgtgatccacccgccttggcctcccaaagtgctgggattacaggcgtgagccacccgcctggcaatttttaattattattatttcttttttaaaaatatgaaatgcttcatgtcatccttacgcaggggcaatactaatctttgcatccttccaactttttgaatatgtgctactgaagtgagcatgttataagggtaaggttttgtttttttgttttttttttttaattttgagatggagttttgctcttgttgcaatgatgcgatctcatctcactgcaatctctgcctcccaggttcaagtgattctcctgccttagcctcctgagtagctgggatcacaggcatgagccaccacgtccagctaattttgtacttctagtagagacggggtttcgccatgttggttaggctggtctcgaactcctgacctcaggtgatccacccaccttggcctcccaaagtgctgggattacaggcatgaaccactgtacccggccagtaaaggctttaaatgtttaatgacttcaatctgttgtgactttttttctgtcctaatagcttaagcaaaccccttctggaatatctgaaaaatatgttggtgggtgtatgagacagggccgacttcatgggtgtgcgacttgtgagtcacccagggccccatgatcagaagcgctgtgtggtcggaagggccccacccttggtttaatgctgctgtcattgtcttgaaattcttaaacatttttgaaaaagggccctgtgttttcattttttactgagccctgcacgttacatggccggtcctggtatgagaccctcttatgctcccctgcagagcccctcgacctcacccactcacgggctagctccgtcaggtgttgacggatgtcactcaggtgtgagctctgcacctgagctcccccctgcacacaggcagccacaaccagtcagtgcagaggtgagcctgtggccagtgaggagccggtgagtcaacctcctcccgcctacgggccctgagacgccggctccgtgagcttgcggggtcgagggcgcctatattaagccaaggctgaggcagtgacacaccctcttatgggcctgctctcgctccctgcttcattgtcctggtctctccctctcgtatggaggatcagactggactcccccagaaaacaagagcatatgaaccttctgtctcaggctctgcctctggggagcccaagctatggttggctgaatagcagccggcaaagatgtccttgttctaattccgggagcacaggggtatgtcaccttccacggcaacagagactctgcaggtgcgattgagtgaaggactctgagatgggagagcagcctggatgatctggagtccccagtgtcctcacagggtccctcataagaaagactagaagaggctgcgctcctggctgcgaaggtggaggaaggggccccgagctgagggatgtgagcccctcgacgctgggaaagacgaggagttggattcttttttttttttttaatttaaaataatttaattttaagtctgggatacatgtgcagatctaaatgatagtctaggagaaaatatttgcaacacctataacagatcagaattcccaagcctgcaggtttgttacataggtaaacatgtgccatggtggtttgctgcaatcaacccgtcacctaggtattaagccccacatgttgctgggcgcggcggctcatgcctgtaatcccagcactttgggaggccgaggtgggtggcttgctcgaggtcaggagttcgagaccagcctgacccacatggtgaaaccccgtctctactaaaaatacaaaaattagctgggtgtggtggcggacgcctgtaatcccagctactcaggaggctgaggcaggagaatcacttgaacctgggaagcagaggttgcagtgagctgagattgcaccattgcactccagcctgggtgacagagcgagactccgtctcaaacaaacaaaaagccccacgtacgtcagctctttatcctggagccctccctcccttccccctcacctcaccccccagcggccccagtgtgtgttgttcccctccctgtgtccatgtgttctcagtattcagctcccacttataagtgagaacatgtggtgtttgattttctgttctgtgttagtttgctgaggacaacggcttccagctccatccatgtccctgcaaaggacatgatcccgttcctttttgtggctgcataatattccatgctgtgtatgtacaacatttttgtcttttgagacagagtcttgctcttgtcacccaggctggagtgcaatggcgggatctcagctcactgcaacttccacctcccgggttcaagcaattctcctgcctcagcctcccgagtagctgggactacaggtgcccaccaccacactcagctaattttttgtattttcagtagaaacagggtttcaccgtgttagccaggatggtctcgatttcctgacctcgcgatccaccctcctcagcctcccaaagtgctgggattacaggcgtgagccaccgcgcccagccaggatgtatcattttaaatcttagtttgtggaacagttttctaactaagcatgtcacaaaacctagagaatcaagaaaggaacatgttgatgagttttgtgtgccagacataaaaatctaaatgatagtctaggagaaaatatttgcaacacttgtaacagaccagaattaacaagcctgcgtaaaaagtgtctttcatcccaaagaaatacgcaagtgatttaattaggaaataaacagactgggtgcagtggcacacacctgtaatcccagcactttaggaggccaagataggaggatcacctgagcccaggaattggagaccagcctgggcaacacagcaagaactcatctttaaaatttttttttaaattagctgagtgtggtggtgcttccatgtagtcccagctacttgggaggctgaggtgggaagactgcttgaatttgggagatcaaggctgcagtgagctatgatagcaccactggactccagcccgggcgacagagccagcaggccctgtctcaaaaaagaaaaaaaaaaaaaaaagaaaagaaaagaaacaaaaagtatgaataggcattttacatatgagggaataaaaatgtctcataattctagggaccggtacacacacatatgctggaatgcacacacacatccaagtgtgtgtacagaaattaatatgtaggctgggtacggtggctaatgcctgtaatcccagcactttgggaggctgaggaaggcggatcacctgaggtcaggagttcgagaccagcctgaccaacatggcgaaatcccgtctttcctaaaaatacaaaattagctgggcgtggtgggtgcatgcctgtaatcccagctaaatcccagctactcgggaggctgaggcaggagaatcacttgaatccgggaggtggaggttgcagtgagccgagaacacgccattgcactctatcctgggcggcaagagtgaaactccgtgtcaaaaaaaaagaaagaaagaaacatgttcataaggcactttattgaaagatagtgtgtaaaagtagcaaaactcagaaataatctaaatgtccatcaatagtatataatttttttttttttgagatggagtctcgctctgttgcccaggctggagtgcagtggcacaatcttggctcactgcaacctctgccccccaggttcattgcctgcctcatcttcctgagtagctgggatcacaggtgcctgccaccatgcctggctaatttttattttttattttggtatttttagtagagacggggtttcaccatgttgaccaggctggccttgaactcctgacctcaggtgatcctcccgcctcggcctctcaaagtgctgggatttcaggtgtgagccaccgcgtccggctaagcatgtaaattaaattactctggagttgttaaaatgcactgatttttaaaaaattattatttttatatcttttttgttttccttcataaaaatgcaatgacttagcaagctgtcggtcataggaagttaagcgaaaaaaaaaaaaagctaagccagcctcagagcagtctgtgttgagtgagtccagttttaaaaacaaatggcaagtgttggtatgaaatagtgccgatctccattacagaagacggtcttgggcacatgtgcgggagccctacggtctggctgaaaatgctgcccagttctggccgtaccactttctagctgtggactcaagggagttgtttaccttctgtcagtccatgtttattcatctgcacaatcaatgcgtagaaccatagcccttacctcacagcgtttccgggaggatcagatgacacaatccgaggaaatgaaccattattgctacttactgtcactgctttcttctgaggccaacgtttgggcacgcctagaagtttgaaggatttgcctcagctgtgaacaaatggtggctacaggtgctgagaatgggtctgaagaagggcgtggagggatcttccctcccctcccctccccacccctccccttctctttctctctccctccctccctctcttctttttctttctctctctcccctccctccctccctctctctctctttctttttttctctctctcccctcccccccttctctcttttctttctttctcttttttgacagagtctcactttgtcgcccagtctggagtgcagtggtgtgatctcagctcactgcaacctctgcctcccagattcacgccattctcctgcctcagcctcctgagtagctgggattacaggcgtgcgccaccacgcccggctaatttttgtatatttagtggagacggcgtttcaccgtgttagccaggatggtctccatctcctgacctcgtgatccgcccgcctcggcctcccaaagtgctgggattacaggcatgagccaccgtgcccggccgcatgtgggtttttcaatggctattatttaagcatcttccatgtcctttgtgtgtgtgtgtgtggtgtgtgtgttttgtgttttttttgtttttgacaagagtctcgctctgttgcccaggctggagtgcagtggcgtgatctcagctcactacaacctccacctcccaggttcaaacgattctcctgcctcagcctcctgggtaggtgggactacaggtgcatgccaccacacccagctaatgtttctatttttagtggaaacggggtttcaccatgttggccaggctggtctcgaacttctgacctcaggtgatccgcccacctcagtcttccaaagtgctgggattacaggcatgagccacagtgcccagccaaggatgacttttgaatgctgtatgattttatgtaacttcttcttcttcttctttttttttgagacggagtttcactcttgttgcccaggctggagtgtaatggcacgacctcagctcactgcaacctccgcctcccaggttcaagtgattctcctgcctcagcctcccgagtagctgggattacaagcatgggccaccacacccggctaatttttttgtatttttagtagaaacggggtttctccatgttggtcaggctactcttgaactcccgacctgaggtgatctgccagcctcggcctcccaaagcattgggattacaggcgtgagccactgtgcccggcctattttatgtaacttctatagttattatattttgttttggggaccaggaaaagaaattgtaaacctttttggcttatttcccatgtctttttttctgtgcattaaaacaaaacaaaacaaataaaacaaggctgggcgtggtggctcacgcctgtaatcccagcactttgggaggctgaggcgggcggatcatgaggtcaggagatcgagaccgtcctggctaacacggtgaaaccctgtctctactgaaaatacaaaaaattagccgggcgtggtggtgggcgcctgtagtcccagctactcgggagactgaggcaggagaatggcctgaacccgggaggcggagcttgcagtgagctgagatcgcgccactgcactccagcctgggcgacagagcgagactccgtctcaaaaaacaaaacaaaacaaaacaaaaaacccattgctaataatgtgtacgattttgcatgtaagtttttcagtgactgtattattaggctggtgcaaaagtaattgcgattttgccgttaaaaaggtgaaaaccacaactacttttgcaccaacctaatatttaagcatcttccatgtccttaaatacaaatcgtaatggataaatacaaggtggtctgtctggaaaaaggaatattactcagccatgaaaaggaacgaagctctgacataggctagcacctggatgaaccctgaggacatcacggccagggagaggtgccagacataaaaggccacacaatacatgatcccatttatgtgaactgcgaaggacaggctaatccaccgagacagtaaagggattcacggtggcctgcggctggggaggggtggagagtgactgctgatggggatgggatgtctttggggtgatgacagtattctggaactacacagaggtgatggttacacaactcctacattttacattttatttaattaattaattaatttatttatttctgagacggggtcttgctcttgttgcccaggctggagtgcagtggtgcgatctcggctcactgcaacctccacctcccaggttcaagcgattctcctgcctcaacctcctgagtagctgggattacaggtgcccgccatcactcccggctaatttttgtatttttaatagagacgggctttcaccatgttggccaggctggtctcaagctcctgacatcaggtgatccacctgcctcagcctcccaaagtgctgggatagctgtcacgagccactgcgcccagccgccaaaacactttcagggaaggttgtacccgcgtagaggtcctttggcagcatgtgacagcttgtatcctcctgtgttgctgccagcatagagcccaaaagctcttcttaatctttctttgttttgttttgttttgagacagagtctcactcttgtttcccaggctagagtgcagtggtgcgatctcggctcactgcaacctctgccttctgggttcaagcaactctcctgcctcagcctcccaagcagctgggattacaggcacccgccaccatactcagctaatttttatatttttagtagagacagggtttcactgtgttgcccaggctggtgttgaactcctgacctcagatgatccgcccacctcagcctcccaaagtgctgggattacaggtgtgaaccattgagcccagccttcctcctagattttcttttcttttctttttttttgagacacagtctcactctgttgcccaggctggagtgcagtggcgcaatctcggctcactgcaacctccgcctcctgggttcaagtgattctcccgcctcagcctcccgagtagctgggactacaggagcccaccaccacgcccagctaatttttttttttgtatttttagtagagacaaggtttcaccatgttggccaggctggtctcgaacacctgacctcatgatccgccctcctcagccttccaaagtgctgggattgcaggtgtgagccaccgcgcccggccttttttttttttttgagatggagtcttgatctgttgcccaggctggagtgcagtggcgtgatcttggttcactgcagcctttgcctcttgggttcaagcaattctcctgcctcatcctcttgaggagctgggattataatcacttgccatcacggccagctaatttttatagttttagcagagacgtggtttcaccgtgttgaccaggctggtctcgaactcctgacctcaggtgacccgcccgcctcgggcttccaaagtgctgggattccaggcctgagccaccgcgcccggcccctcctagatgttctaagtacaaatccgaaagcccactgggcctgaacgtccctggtttgtggtgctgcctccaggggtcccctcctgttacctcttccctgggccggtgaagggagggtggacgggatggtgtggggccgcgggtccccatgcctggagccaagcctggggcatctgcttgcatgctaggagctccctccccagcaaggcccgggccagagagagaaggaacagcccagagccaggagaaaagggagagtgaggctttttattgtgtatgaattcacgtggtatcgacaactccacacaatattaaaacactgcgagaaagtgggtgcggcacacctggaattttaaaaaagtcagaaataaaaacaaccagacatcccaatgcagatggcatagaacctgctagaaccacaggcggcggctggaaacaggagacaggtctttacgaaggttagatgggcagcggttccgtggacagaggaggaggcgcggctggccggcatatggcttctgtgcagagggcctggcctcaggccgtggactttttaataagtgaccccttgaggaagggcgtggtggctccacctccacccggaagcccccccgggtcactcacgggcggacaggtgtgtgacggccctctcctacctgccccagaacttgggcaggacgggctgttaacttggagatggatgcgtggcctggaggcctagcgttgcgcctcggacacggtggccggcccgtcaaagggaccacgcagaaggagggaaacaggagcaccttccgccctggcccagccgccccgtttatgtccccagaggccagaggtcgcagctgagctatctgtgcttggcctggggttacccctggggagggtgggagaggggtgagggttctggctccttcctggagagaggagggcaggggaggcggagctggtccgggaaggtgcccaggtgggtcacaacagggtcggggcctggcccgctgtggcccttcacctggctactggtgtctcgctcagcagcggggaaggcccgtgggagacccaggctacagaaggagaaacggccttctctctcccacccgacgctgccttgtgtgtgtgcgtgggtgggggtgagtgtccttaactctcttttcccctggcgtagctgagagaggcttgtccccccaaggctagagctgctgctgccacccccgcccgccagctccccgtctggaggtgcacgcgcgctcctggaaacgcccataaaacatgcgttcaccccagggattcccggcagaaaagcacatgtggcggtcggtgtgtgcactcgggtgccacgtctgcaaaggtattttccacagtgtggtcactgaagtctactcaagaaaaaaaaaagtggagaattttttttttaatcccccaagctagaaagaaacccacaggcttctggcaatggccacctccctggggtccgggagatggtggggtctggacagctcagggaacccaaggccctgtggacagtgaaggagaggccagcctgtccttcccctccccgagcctcagtttacctggaacgctcagcccgtttaaccccaccatctgcaccagcctaggagccccggctgcctggggctgcgtctctgcagcagcctccgttccctgctggcatttctggggtcacattgtgaggacacaccagtggggccgggcttggcacagctgtgccccctcctccctctgccctggcagcgggggctcggggattaaggcctcttttaaggaaaaacggggtggggtgtgtttgttcccagttaccaagatggcttgttggaaagggtggaggcaggcgggctctccctgcctggggtcctcccagggtctctggaacaggcttttgtcccttcctgccattcctgctatgcgtggtggggacgcccacaccccaaaccctgccggctcccagcccaaccacaggaggctgcagtctccgggagcctctggggctctcccgggccaacagcaggtttggcgggtagggctccccgaagccccagccctcccggacctgccgtagagagctgggtgccgggggtggggagcccggctgtggcctgtgggagctgcccgaggttgaggagtggaggtcactcccccgacacctgcacacacacccggagccctctagccttggcgaggtgggaaccctggcagtcaccagctcaggaagtgagccaagcagggatccccgcctcacgggcctgcacggaggacctgggcggccgtccaggaaccctctcggcacgggttcttagacgcctgtctccactggggccggagggacaggactaggctagttttattctactacttgcttctaggccagccccgtggagggggtcggggcggccaggcctcctgcgatcagggctgcgtggggtccatctcaggtgtggccgcaggtgatgccggcaggccctggaagatgtggctgcacctgctcccgtccgtgccgcagaggaggacgcagtcatctttcagaagcctccccccgaccccatgacatcttcgatttccacttgccgctgggaggagtggcccatcctgcgtctaaggcatctcccggcctcagacagccgtcctgggttgcacgggggtggaaaagcaaaaagatcgggttcgagcgacagggtaacgttttgagcggacgttttgatctccgggacaacgtctcacctcccagagtccttcagagtcactccaagatcatggaacaattttgtacacacagcagcacagggtagccccacccgccctgccgcggctccccagcctgcattttctgtttgaaaaacgtctatggtggatgccagagggtaggacaacctggaagagccaaggatggtcaaagcctctcccagccacgcggatgcctcatgcttaaaacacactgggcgcggtggctcatgcctgtaatcccagcactttgggaggccgaggtgggcggatcccgaggtcaggagtttgagagcggcctggccaatacggtgaaaccccgtctctactaaaaatacaacaattagccgggcgtagtggcacacgcctgtagtctcagctactcgggaggctgaggcaggagaatcgcttgaaccggggaggcagaggttgcggtgagctgaaatcatgcagctgcactccagcctgggtaacaagaatgaaactccatctcaaaaaaagaaaaaaaaaaaaaatccaaaaacatgatgggccgggccggtgacggcttccctggggcaagtcccgaaaacccatttctggcacagaggggaccctgcagaaaggacccatggctaacatcatgcaggggagtcacacttggcaacttttcatagacgaagccccctccagacccccacactccatcgtgcattcattgcaggatcgtgcagtttagcgacgggttcaaccatcacaatccgagtttagccgtatggagtaacaattttttaaataaagagatatttccaaaaaacttcatgatgtcacctcccgccccccatctcaattttacctctacttaaaaacaacacaaagcattccagtgaccctatgaagtctttttaccaatggccaattctcccggaactattgccaccgggcgaagtcacctccctttccccctcggcgccggtccacaattgaaacggcaatcgagagttttaaaaaattgttaccccatcgctgggggatttcagttattccgaacgggaagtggccgtaaagcctccatcccttttggcccaaactgagagggccatggggtcggacctgaaaattcatctccacctacaaggtccattctaccccatccgggcggtgggaacgccttttttggcggggagaggggggatttcttttggaattaaaggttttggggacttgagatgttttgtttgagctaattactgaatgatgccctgcctgagacagagacagagacagagagagagagagagaaagagagagagagagagagaacatatgagaacacagttataaaataatacaaggtttcttgtccttaaaggggttctccgaggcagggactccgaccagcagggggtcgttccgggcatgttgctcacagtagctcatgaggtcagacgccgctttggagacctgtgtttgagcacaaggaggagacagaggagacataagaagaggctggcacacccgggttcacagcagcaccattcccaagagccacaggcggaaacagctcaggagcccattgatgggggcgtgggcaaacagtgcggcccgtccacacgctggaatattactcagccatgaaaaggagtgaggctctgacataggccacaacgtggatgcatctcaagggcctcatgctcagtgagagatgccagacacagaaggccacacagtgtgtgatcccatttctttcttttttttttttgagacagagactctatttgtcgcccaggctctagtgcagtggcacgatctcggctcactgcaacctccacctcgcgggttcaagtgattctcctgcctcagcctcccgagtagctgggattaccttcatgcaccaccacacccagctaatttttgtatttttagtagagacagggtttcaccatgttgatcaggctggtctcgaactcctgacctcgcgatatgcctgcctcagcctcccacagtgctgggattacaggtgtgagccactgcgcccggccgtgtgatcccatttctatgaaatgtccaggacaggcctatccacagagacaggaaggggatgcgtgggtgccggtgctggggagtgatggctgatgggggacagggtttccttttggggtgatggaatgtcctggaataaacgtgattggatgcacagcattgtgactatattaaatatcactagtggtaaactttatatgtgtcttggccaggtgcggtggctcacacctgtaatcccaacatgttgggaggcggaggcgggaggatcacttgagcccaggagtttgagaccagcctaggcaacacagtgaggccctatctctacaaaaaatacaaaaatgagccaggcatagtgatgtgggcatctgtagtcccagctaactggggggctgaggctggaggattgcttgagcctgggaggttaaggctgcagtgagtcaagattacaccattgcactccagcctgggggatggagcaagaccctgtctcaattaagataaataaacaaataaataaatttatgtgtgtcttttcccaaaattaaaaaaagaaaaatgcagtggtgtgatcactgcaatctcttgctccccgggttcaagcaattctcctgcctcagcctcctgagtagctgggactacaggtgcctgccaccacgcccagctaatttttgtatttttagtagagacgggtttcagcatgttggccaggctggtctcaaactcctaacttcaagtgatccacctgccttagcctcccaaagtgctgggattacaggcgtgagccacggcacctggcctaaaaaatatttttttaaaaaagaaaaggctgagcttccttcagcaagcgttgccagattttgaacacaaagggtcagggacagatggaccccgttttcggagtccaagacctcattctcaccccaaggaaggaaggtcctgataggaaaacgctgcctgcacatttgatgagcttgagggaggtttcacggtgacacccggccagggggctgggcccggtgaggacgagataagcccgtctccatgtttctcttgcagcctgaaccccctgatgactccaaccctctgaggggctgatgcttccggtcacaggagggaccccctgccccgggctgctgccagcccgccccaggctacacgcccgtctctcctggccatgcctttgggggtgccgctgccactccccgcttagctcaccccagcagggctggggctggggtgtccggtgtcctgggtcaggctacacggggacacgtccatctggccctggatctcatcccgtaaccggtaactgtgtctctgtgggactcagcgacctttctctccttgctttctttcctggaaggcgagagggcgatcacagggggaggattagatgtggcagaggtgaggggatgatccgagaaggatcgcagtgtcgcttcacggaggtgcctttgttatctgtttttgagacagggtctcgctctgtcccccaggctggaatgcagtggtgctatcatagctcaatgcagcctccacctcctgggctcaagtgattctcccgcctcagctgggagtacctgagtagctgggactacgggagtgagccactacacctggccataattttcatttttattatttatttatttttttgagacagagtctcactctgtcagccaggctggagtgcagtggcgtgatctcggctcactgcaacctccgccccctgggtccaagcaattctcccacctcagcctcccaagtggctgggactccaggcgcacgccaccacgccagggtaatttttgtatttttagtagagacggggtttcaccatgttggccaggctggtctcaatctcctgacctcaggtggcccgcccacctcagcctgccaaagtgctgggattacaggcatgagccaccgtgcctggcctggccataatttttagaataattttctggtacagatgaggtctcactatgttgctcaggctggtctcgaactcctaggctcaggcgaccctcccgcctagacctctgaaagtgctggggttacaggcatgagccgcctcgcctggccagtacctctgcatcccagatcctctgtcctcctttggaccccaaggatacctgggacctgggcccttcaaacggccaggagcctgtgggacagctttggggtcttgcccagctgggcagccgggggacgctcatgcccacagagtgagcccgccggctgcggcctgtgatgactcggacctggcctgctttctagacttctatttgggaagcggccctcctggacgacagaaatagcctccagaccccgaaaatagctggcattgtggctccagcacgtggcaccttggcaccaccccccatgcccactgcgctgggctggtgagccccaagatcgtcgccgttgaggttctgtggttctggtcgccgcgttggagctggggatgtaaaacctcaggcgggactgggagtggggacgggtcaaatcctggctccccccgaggcccgacattcaaaggggcggtgggggcccctcctcaacatcaaacagggcaggatgagtcaccgccctccgcccgggctgggggctggcacccactcgtaaaaggaaaaccacttcaaccagggctttctctcttttcagcccgaaggaatgctttgaatgctcaggtctgtcctcagcagtcagattgctggaacattcagacacctcgtgggaggcagacccctcccctactggttggatcccggccagcagcagcgtgatggggtctgggagggctcagagctgcgctggagggagactcaccggccgatcagaaccacctgtgccacctggccagcagggacgactctgtccgcctccccgctgggagcaaagcaagggccggtcaccccttcctaataaattcccgtggccaataatgacaagctggtgacaggtgctggagagctgagttctgagtggatacgtggggtgatggctgattttatgggtgcactagggcgggccatggtgccccagggtttggttaaatgtttttttgtttttgttttttttctgagatggagtctcaccctgtcgcttggggttggagggcagtggcgcaatctcagctcactgcaacctctgcctctcgggttcaagctattctcctgactcagtctcccaagtagctgggactataggagcctgccaccacgcctggctaatttttttgtaattttagtagagatggggtttcaccatattggccaggctggtctcgaactcctgaccttgtgatccgcccacctcagcctcccaaagtgctgcgattccaggcgtgagtcaccgtgcctggccagttaaatgtttttttagatgttgctgtgaaggttgtttttttcttgtttcttttttttttttttttttttttgagatagagtctcgctctgttccccaggctggagtgcaatggtgcgatctcggctcactgcaacctccacctcccaggttcaagtgattctcctgcctcagcctcccaaatagctgggattacaggcatgcaccaccatacccgggtaatcttttttttgtatttttaggagagacggggtttcaccatgttggccaggctggtctcgaacccctgacctcaggtgatctgcccacctcagcttcccaaagtgctggaattataagtgtgagtcaccgcgctcagcctgttttttattttgtagagatggggtcttgctatgttgttgcccaggctggaattgaacgcctgacctcaagtgatcctcctgcctcggcctcccaatgtgctgggattacagctgtgagccactgtgcctcacatgcaaaattttttttttttttttgatgtgattcacatttaaatccgtagacttcaagcacagcaggtgaccgtctgtaatgcagatgggcctcatctaatcagttgaagggcttaagagaaaaagcctggggtccttccaggaggagggaactctgcctccaggtggccttggggttccagctgcagcaccaactcttccctgggtctccagcctgctggcctacactgcagatttcagagcttgccttaaaataaatctcgacaaggcgcagcctcaagtgtgatccttgtaaaaaacttcaaacgggccaggcatggtggctcacgcctggaatcccaggactttgggaggccgaggcaggcggatcacctgaagttaggagttcaagaccagcctgggcaacatggcgaaacgccgtctctactaaaaatacaaaaaattagccaggcatggtggtgcatgcctgtaatcccagctatttgggaggttgaggcagaagaattgcttgaacccgggaggcagaggttgcagtgagccgagatcgcgccactgcactccagcctgggtgacagagcaagactccgtctcaaacaaacaaaacaaacaaatccttcaaacaacacagaagtgaaaagtagatacgacatgcagtctcctcccgcctgggactgtgtctctcagtttaatttgcatctgtcattgccaaggagctggacagatcaatgcagatgaggacgacaaagcgctctgtcacgatgaccgtctccacggggccccagtgtgtttacaaagcacgttacattgctgcacgaaggcaggagataggtgttagatcagctgcctctttctgccgaggaaatggaggctcagagaggttaagggagggcctcaaggtcacacagcaagagacacagttggggtgcaagcctctgccctcctgccgagcctcctgttcatcatttgcggggcccccaagggtctctcccctcctcttcctgatgcccgctgggctcaccttgatgcgctcaatcccggcttctatgcgtagctgttccaccagcttccgggcctgggctatgttgttagtggctgacattgtctgccatcagctctgggccccgttgttcagagagctgtgggggaagcagaggggtgtgggtcaaagttcaggtcaggcctctgggtggcagcaggggcgcccggccttggctcaaccttcccgactctaggcacggccactttgcctctgggtggggaccaggggcctccgtgtacaaagagctggcactcgtttaactctcagcatagagcctggcacgcggtcagccgtcacaatcctctgtgggagtttgcagaacgagagaatgaaagggcgaaggcaggctgggcgtggtggctcacgcctgtaatcccagcactttgggaggctgaggcaggtggatcatgaggtcaggagatcgagaccatcctggctaacacggtgaaacctcatcgttactaaaaaaaaaaaaaaaaatacaaaaattagccaggcatggtggtgggtgcctatagtcccagctactctggaggctgaggcaggagaatgacgtgaacccgggaggtggagcttgcagtgagccgagatggtgcccctgcactccagcctggacgacagagcaagactccgtctcaaaaaaaaaaataaagaaaaaataaagaaagggcaaaggcaataggccaggccctctggagaagggaggacccacgcaggctcccgggtggcctgcctcagtccatggcaggggttcttgccctccaggggacactgggtgatatctggggacatctgtggctgtggggggtgctcctggcatggagtgggttgggtggaggccagggacattgctcagctccctgcagtgccccggacggccccacgccagggaaggatccgaacgcgatatccatagtacccaggggagaccctgggtcagggcagggatcacagcagaacccctggtgactgtccccctccgtgtttttttttttttttttttgagacagagtcttgctctgttgcccaggctggagtgcagtggtgtgatctcggctcactgcaacctctgcctcccgggttcaagcgattctcctgcctcagcctcccgagtagctgggattacaggcacgtgccaccacacccggctaatttttgtatttttagtacagacagcgtttcaccatgttggccaggctggtcttgaactcctgacctcaggtgatccaccctcctcggcctctcaaagtgctgggatgacaggtgtgagcccggcctctcctccgtgtccttcatattgaaccagtcaggagcccatgctgttgcttcttgaattctcctggaaaaacccaggacctcaacagggcagacgatcacaggacgcagagtctcttgggagtccgtggaatccccagatctcatctggggatgactctgccctccatggagcactgggtgatgtctgggacatttgtggctgtcatgacttgggggtgctcctggcagggagtgggtggaggccacggatgctgctcagcaccctgcagtgcccaggacggccccgctccagggaacgatccagccccacgtgtcagtagtgtccagcctagagaaacctgcttcgtaggacccagtgagggggttggtgctgatgggggtggcaggggcaggggccaggttcaagagtcctgggcagccgcagtcccagccgggcgtctgtgagcagttaattaagccgcaccctgtctctgtcataactcatggcatcgctgtctgttttgcagagccaggcagccgcagagaagtcaaggcagattccagagttctcaaaaaatgcctacttagtgataagaaggaaaggactggccgggcgcggtggctcacgcctgtaatcccagcactttgggaggccgaggcgggcgggtcacaaggtcaggagatcaagaccatcctggctaacacggtgaaaccccgtctcccgggcgtggtggcgggtgcctgtagtcccagctactcgggaggctgaggcaggagaatggggtgaacccggaaggcggagcttgcagtgagcagagatcacgccactgcactccagcctgggggacagagtgagactctgtctcaaaaaaaaaaaaaaaaaaaaaaaaaaaagaaggaaaggaccatccatgcataccacaccgcaggggaatctccagggcctgggatgtgtagcatgcttctgtttgtgtaatgtgtttaagaggactttttttagacagagtctcgctctgttgcccaggctggagtgcagtggcatgatctcagctcactgcaagctccgcttctccagctccagcgatactctcacttctgcctcctgagtagctgggattacaggtgcatgtgccaccatgcctggctaatctttgtatttttggtagagacatggttttaccatgttggccaggctggtctcaaactcctggcctcaagtgatctgcctgtctcgacctcccaaagtgctgggattacaggcatgagccaccatgcccggcccaaggacgaaattttagaaatggagaacagattagcggctgccagggatcagggaggggcaggggctgggagggagataggtctctgtataaaagggcaacacagccaggcatggtggctcttgcctgtaataccagcactttgggaggctgagatgcgaggatcacttgagtccaggagtttgaggccagcctaggcaacatagcaagaccccctctctacaaaaaattagaaaattagctgggcatgggtagcgcactcctgtggtcccagctacttgggaggctgaggtgggaggatcacttgagcctgggaggttgaggccagactgggcaatttagtgagaccccatctctgaataaataataaaagggcaacacgaatgatccctgttagtgcctcaactacggtgatgaatccacaagcctacatgagtgataaactcacagagagcctcacacactcacacaccagcgggcacaatactgaatactgtggaacctgagtgaggctggtgggtgtgtgactgtctggctgcgatcctgcccatagctttaccaaatgttaccaccagggacggccggggaatgacacacagaattcctctacattctttgttagcactggctgtgactccacggcgatctcaataaaaggggcaattaaacaaaaaatccctttgacaccgcccagcctccttggtttccagcagacgtcccacccccactttttgggggcagagaaggcccaatctgtctgctctggaggcagagcccacgtgtggccgctcagagggctctgattccagagagcttcaaagcagccacaaaacatccaactcagggaaaaccgcccttggttgggcttaaaaatacctaaattactcagtgctaaaaatacgtgcacgcagagaacaaacgggctggccgcacctcctgttttccttggaaggccagggggtcctatttagcatccacagtcaggagtgtccacccagaccctgggcccctgctgccctgggcagccaccgcccgcaatttccatgtgagcatcaggtcctgagccgtgctggcttttctgttttgggcgaaattccctgcgagatgctgcctttgggctgggtaataacccaggcctgccaggaaggccagagaggactgcgctgtgtgtgtgtgtctatgtttatttgcatgtatgtcaatgatgcacatgtgactgtacacgtgtgtacacgtggtgtgcatgtcagtgtgcacatgtgtatgtgtgtgcacatgtgcatgtatgtgtaccttgcgtgtgcatgtatgtgtgtatgtgtatactggcattcatgagtgtgcatatatgcgtgtgtgcacacatatctgcatgtgtatgtgtacctgcatatgcatgggtgtgcacgtcagcatgcatatgagtgtgcatccttgcatgtgtgtacatgtgcatgtgtctatatgagtgcatgtacacatctacgtgtgtgcgtctgcatatgagtgtgtgcataggtgcatttgcatacgtgcatgtgtgtggacatgcatgccagtgtgcacgtgtgtatgtgcacgtgtgtggacacggcactgcatgtgcgtgtgcgcacacgtgtgtgggcatgcatgtcactatgggtgtgtgcatgcgtgttggcgtgtgtgtacgtcactgtaggtgcgtggatatgtgcgtgcgtgggtgtgtacatgtgtctgcatgtgtacatgcgtgtgcgtgtgtgtgcgcacgggagtgcatgtggatgcttgggctgagatgccgagactcagacacagattgcatcacccatgcagtcgcctccctaagtccccgtctcggtggtgtcaccagccggcactgactcaggagcagccatgcccccagcagaggactaagccaacagcagcagaactggccacgcactgagtcagccaggaacgcccctcccaactgcctccctgcagaggcgcacgggtgccgggcaccccgacctgaatgagcttgcctcggggcccgtggcccggggaagctgtgggaggggcgggagcaggcagctccgggggcagggccaggtggtcaaaggtgcacacagtccccacggctccctcctgacggtcgggctctgcctcggtgcacaggctcctgcaggcaggcaaggctccaggccaggctctccaaaaataaaactgaagagggacgccgcccggccccgcgctggcctcctagcaaaaggctcatagccacacccgagtctaagcccgcctcgtgcagaaaaatcccactcgcgcctgaaagtcaagaaggatgagggtacccccccactccaggacatagtggaaatctgtggtcgctcagggaagggtgaccagccccgaaacagagcagacctgagctgatcagacacgaggctccagtgcacagaagggctgaacaaaaccgcaggacaggagctggcagcaccggcagggagggaggtgggaccacagggacccccagggagcagccgccctctaaccccttgctccggcagttatcccgagggcaaaaaatgaaaagaaataaaaatctacatatagaaaggcgtttataattgcgttatgtgtaagagtgaaaagttagaatgaaagcaagtgctctgcctcttttttttttgagtcggagtctcgctctgtcgcccaggctgaagtgcggtggcgcgatctcagctcactgcaacctccgccttccgggttcaagcgattctcttgcctcagcctcccgagtggctgggattacaggtgcctgcctccacgccaatttttttttttttttttgagacagagtctggctctgtctccgaggctggagtgcagtggcgcgatcttggctcactgcaacctcctcctccagggttcacgccattctcctgcttcagcttcccaagtagctgagactacaggcgcccgccaccacgcctggctaattttttatatttttagtagatacggggtttcaccgtgttagccaggatggtctcgatctcctgatcttgtgatccgcctgcctcggcctcccagagtgctgggattaaaggcgtgagccactgcgcctggccaatttttgtatttttaatagagacggggtttccccatgttggccaggctggtctcaaacgcctgacctcaggtgatccacccgcctcgacctcccaaagtgctgggattacaggcgtgagccaccgcgcctggtctactattagtttataatataaacttatactatattatactatagtattatacatttattacatatttatatattttattatatatttgtttactcatatatttatatttatactcatatttatatttatgtcatttatcatgcatttattacatatttgaagattcattcactatatattcatatcagttttgtattactaatatatagttttagtatttagtatgtattatacacttattgcatacatattttatatttattcatcatttacataatttatacattattaattatatagtttgatttctattttgacatttacattgtttgctattgattttatatttgtatttataatatatttagattactattttatatctgtatatatgtattatatagttatagaatctgttataggtttattgaatattgtttatcttaactttttttttttgagagggagtctcgctctgtcgcccaggctggagtgcagtggcacaatctcggctcactgcaacctccacctcctgagttcatgccattctcctgcctcagcctcccgagtagctgggactacaggcgcgcgccaccacaccgggctaatttttgtatttttagtagagacggggtttcaccatgttggtcaggctggtctcaaactcctgacctagtgatccacccgcctcagcctcccaaagtgctgggattacaggcgtgagccactgctcccggccctatcttaactttttattttgaaacaattatggactcaggcagttgcaaacatagtccagggagccccacgcaccctctcccggtcccctccagggcgacgtcacctgtgactatgagacactatcagaaccgggaccctgaggtcagcccaatgctgtgtctcactcagacggcaccactcccaccggccctcatctgggggtgcagagggagttttggtgtcgcgcatccctccaggaagggggcctgggttcctgcctggaggcatcgcccctctggagctgtgcccccgccctcgaacctgtccccactgggaggaggagaggaggtgaggaggtgtggcctaaacgtttgctgagcagatggctgagcagacaaagacccaaaactgcgacaaaattgacagtggtgtcagtaaagagagacacagcctagggccccagtctgcaaaatgggctgaactccgaagttcctaaaatcctaaagagacctgatctacaccgggaagtttaactcactccagtacaggccctctccctctggctggatccttttctggggtggggctgtcctgggcactgcagggtgctgggcagcatccctggtctccacccactccttgccaggaaacccccccccccaccagtgcgcccacagtcatgaccagcacaaatgtccccagacttggacaggtgtcccctgggggaaaattttaggcctttatggaactcccttatcaggagaaatcctgcagctcagagtggttcccttaggcaaaacgcaaagagtttgaacccagctgactgaaggccccaaaaataaatggtactgaatgaaaatatgctaggcgtggtggctcatgcctgtaatcccagaactttgggaggttgaggcgggtgggtcatttgaggtcaggagttcaagaccagcctggccaacatggtgaaacccccacgtctgctaaaaatacaaaaaaatgagccaggcatggtagtgcgtgcctgtaattctagctactcaggaggctgaggcacaagaatcgcttgaacccaggaggtggaggttgcagtgagccaagatcgcgccactgcactccggcctgggtgacagagtgagaccctgtctaaaaaaaaaaaaaaaaaaaaaggcctggctcagtggctcacgcctgtaatcccagcactttgggaggccgaggcgggcagatcacgaggccaggagatacagaccatcctggctaacacggtgaaaccctgtctctactaaaaaaaaaaaaaaatacaaaaaaattagccgggcatggcggcgggcacctgtagtcccagctactcaggaggctgaggcaggagaatggtctcaaaaaaaaaaaaaaaagtaaatacaggggtgtttccaaaagggctttaattttattagcatcccagaatgctttgtgactaggagaggccccacagggcgggagtcttcccccagatgtgagccccgttgcatttgaagggagtgagaccacagctcccacagaggagggaactcgggaaggtggtaggccagaaatctgcccttgctctaccaagctgtgtggccttgggaaagtttccttccctctctgagccccagtgacctctgttggaattctcagagggacactctcatctctgcaccaggcctggcccccaggttcctgtgtgaggaaacaggggttccagagtctggcaggcaggaagaggaccctcttccagggacctgtggcaactgccaaatataaacacagctgctggaaagacaaggtggctggaacatcctgcacccagcgaatgtggaagggccggtttgcccggagctcttgagaaatctcactccccgtggacttgcaccctgtcgccactcccctgacctgccctgaggctggggtgcagcagggaattgcaacagccccccaccgccggccctggagagacctgggcagagctggaagctgatcagattaaaaatcagcatggatcggattcgggatagagccacaaactgggtgtcctgaaattacccatttttgtgttggtgggtttttttgtttgtttgtttgttttttggagatgatggctcactctgtcgcccaggctggagtgcagtggcaccaactcggctcactgcaacctccgcctcccaggttcaagcgattctcttgcctcagcctcccggagtagctgggattacaagcatgcgccaccacgcccggctaatttttgtatttttagtggagacagggttttgccatgttggccaggctggtctcgaactcctgacctcaggtgatccacctgcctgggcctcccaaagtgctgggatgacaggcgtgagccaccacgcccggcccatttttgtgttgttgaacttaaagcatgagcttgggcaaatcccttcttcttctgagccatagggtaaaggtgagaggagagtcttgtaagctccgtgatgagttccagaagtccagggtgaccagtcatgcttagatcatttccgtgtcatttatggactcgatgagagacaaaagggcctctggggactgtgagttgcatcagcctcttgctgaactgacagaacattcaggtttcagggagaggtgaggtcattgccagggatcttgttcaagggataagggctgacacctgctcctgaagagggaccacacggtgcctgcctggaaatggaaaatccgggctcgcactctggctctgctcctggtttttgggtcttggcttcctcagctggaagatgagagggctcctctcaaggctgaggatgggtccccatttgtcatcctgtggctccaagatcaagaggatctagaatatccatgacctccttctaaacgacttggactttgggttaaaaatctctcttggcagattttggcttgcacaatggtggattagcagctaaggacaaacccactctcttgctgaggtccactagaaaagctggacagggccgggtgcggcggctcacgcctgtgatcccagcactgtgggaggtcgaggcgggaggatcacttgaggtcgggagtttgagaccagcctggccaacatggtgaaaccccatctctgctaaaaatacaaaaattagctgggcatggtggcacgtgcctgtagtcccagctacttgggaggctgaggcacaagaatcacttaaacccgggaggcagtggttgcagtgagctgagattgtgccactgcactccagcctgggcgacagagagagaccctgtctcaaaaaaaagaaaaaaaagctggacagggctgggtgcggtggctcaagcctgtaatcccagcactttgggaggctgaggtgggaggatcacttgaagtcgggagtttgagaccagcctggccaacatggtgaaaccccgtctctattaaaatacaaaaattagctggacgtggtggcgggtgcctgtagtcccagctactcaggaggctgaggtacaacaatcacttaaacccgggaggcagaggttgcagtgagctgacgttgtgccactgcactccagcctgggtgacagagtgagaccctgtctcaaaaaagaaagaaaagctggacagaatgtcaaagcatctgctcaagggcctgcagggttattaagataatggagaatttccagccaggatttaggggaggatcgaaagagagcctgggtttggggtcactttttcctggggttgggagggtttgctgagaggccgagtgatatttctatcagcttcacgaggccaagggtacagaaattgaggtccagggtttcctgaggagagaaggcttggtaaattcccccttggtgtgaattgggacaacttaatattgcactgtaagagtaacggtcacagctgggcacagtggctcacgcctggaatcccagcactttgggagaccgaggcaggtggatgacctgaggtcgggagttcaagactagcctggtcaacatggtgaaaccccgtctctactaaaatacaaaaattagctgggcatgatggcgggttcttgtaatcccagctagtcaggagctgagatgagagaatcccttgaatccgggagacggtggttgcagtgaaccgagatcgtgccactgtattccagctttggcagctgagtgagattccgtctcaaaaaaaaaaaaaaaaaaaaaaaaaggagtaaagatcaagaggaagcagacaggtccttctagcaactacagcagagttttgaataatctcaatccctaatattggattaaggtgatgcgagattgctggtggccccaaatgcctggaagaagtaaacataaatcccctctggaggaaaataatacgatcccaggcctcagattatttctacatgcaaatccgcaatacaggccgggcgcggtggctcacgaggtcaggagatcaagaccatcctggctaacatggtgaaaccccgtctctactaaaaatacaaaaaattagccaggcttggtggcaggcacctgtagtcccagctactccggaggctgaggcaggagagtggcatgaacccgggaggtggagcttgcagtgaaccgagatcgtgccactgcactccagcctgggtaacagagcgagactccgtcccaaaaaaaaaaaaaaatgcacaatacaatatctggcatgcaagtaagacatacgaggagccaggaccacataaacaaaaatcagcagaaataaccagcactgccaggtgcggtggctcacgcctgtaatcccagcactttgggaggcctaggcaggcggatcatgaggtcaggagatcaagaccatcctggctgacacggtgaaaccccgtctctactaaaaacacaaaaaattagccgggcgccatggcaggcgcctctagtcccagctacttgggaggctgaagcaggagaatggcatgaacccgggaggcggagcttgcagtgagctgagatcacgccactgcactgcagcctgggcaaaagaacgagactccgtctcaaaaaaaaaaacaaaaaaaaaaacaaaaaccagcactacaaagagacccacagggtttccatatactgggaattgacagagactttaaattaattgtgttaattacgttcaaagagataaaaagatgagattggaattttcgctgcaaattggaacaatggggaaaaaaaggaaccagtggatatggagaaaatgacaatatctgaaaagtaagaattcaatggaagaaataaaaattagtgaactggaagacagaacagagaaaaatatccagaatgaagcaagacgacacaaagggaaagaaactacagaagaaagagcaaaagacatagaagatgcagtgacgtctaatatacgtgttattggaacaccagaaggaggagagagagaatgaagcaggaacaatctttgaagagataatgaccaataactttctaaaactgataaaaagacctcaagccacagatttcagaatccctagaacctcaggcaaaagaaatgtcctaaaaagtggcagagaaatggccaataagcacatgaaatggtgtctaatgattagtcatgaaggaaatatgaattaaagtcatcaagagagactgcctctcaaccactagagtggcaaaaatttaaaagactgacaacactaaatatttgggaggatgtagaagaactggaggcatcatccattactgacaggaatgtgaaatagtacaaccaccatggaaaatggcttagcagtttcttataaggctgaacacatacctcacctatgacccagcaattccactcctagggatttattcaagataaataaaaacatgtctccataaaaggacttgtacgagatgttcataagcttttactcataacagcaaaacctggaaacaacccaaatgcctgtcaacgagagaataaacaagccatggcatttcacacaatgaaatacggctgcacacaaaaaaagaataaactattgagagatcaagcaacgtgtatgattctcaaaaatataaatgtattctaaaaaaataaaagataatacattattcaatattaaatattagtatttaattaatattaatatattaaatattaatattaaatatttaaaaaataaatgcctctcaaaaataaaaaaagtaaagcaacagaagctggatattagaggtgcatattatataattccatttatataaagttcaagaataggcaaaactatggtgatagaaatgaaaacagaggttgctgcctctggccagggtgttggctagaaagggccatgaaataacttctagggtgatggcgatgttctctatgttggttgagctgttggtgtacacaggtgtacacatttgctaaaatccatcaaactgtatctttaagatctgttcatcttactgcatttgaattggactttgataaaatcagttaattacaaacaaaaatcaacaaacaaaagttgccagaggaaaaaacagcagcaattaggtggacccagtgaaaatatccttcaagaattagggggaaataagggcattttcagataaacaaaaccagactttctcaccaacagacttgccttttaaaaggtaaaactagagaaagataattccagatgaaaggtagaaaatgcaggaagaagtgaaaaacaacaaaaatgttgtagagaggaaagagcttgataagataattctaaaattccagtggaaagatcaacaggaagtgaaaaactctgcaaaagccttagaacaaacacacatgaatcatatcagccttcagctcagtcctcacctccaaccaacccacaacagaagatgttctatgcttctgccttcacatttttattatacgatttttattatataattttggtcacgggattccagtgataggagttataaatattatttcaggagtttactagtgacattaattgaattttgcaattctacacacacacaaaatgaagtcagcatctgaaaaaatatatatacatcctcatccgctgtgactggtccaatgtcagtgtgataagactcaatgccagctgtccccagagacttttcttcagtccagccagcccctccttggatgtccacttcagcagtgctctgcagcctcaggcagatccccgtgtactccaccagtggcctccgctccactccccactccctccatctcctaacagctagagtgcgcttctgaaaatgcagttgaatctgttcctcccctactcagaaaccaccagcagcttccaattccttacaaaatcaagtgcaaaaatcaaggcttattgttcaattcccactgctaggaattcttcccccagctccaatcccatcaaagaactgccttctctgatgcatggctccaggatcatctcctttctcaccctgtggcctcatgagctcagcattttccagattcggaaatcctggagggggccatgagggagatggctgtccctgggaaactaagacccagagaaggtagatggcttgcccagaagatatttattataagaaattggctcacataattatggaggctgagaagccataagatgtacaattggcaagctagagagacacgagaactgatagtttctgtctgaaagccagcaggcttgagacccaagagcagatgtttccactggagtccaaaggctggaaaaacctatctgtcagcttgaaggctgccaggcaggaggaattatctcttacttagcatttttgttctattgagggctttaactgattagatgaggcccccacattggggagggggaggaatatgctttacacagcctatggttcatttcatccagaaacattctcacagacacacagaataacatttaaacagatatctgtgcaccccatggaccagtcaagttaacacataaaattaacagttacaacaatcttggagccagtcattcagcccaccacatcattctctcatggccctctgtttcttttcttgtagtatttataatttgatatttgagttgtatgcctactggactgtcagcctcatgaggccaaagatctgggggctgggtgcagtggctcatgctggtagtcccagcactttgggaggctgaggcaggaggatcacttgagcccaagagttcgagaccagcctgggcaacatggcaaaaccttgactctacaaaaaaaaaaaaaaaatacaaaaaactagttgggtgtggtggtgcacacctgtagtcccagctactcaggaggctgaggtgggagaatcgcttgagcccaggaagtggaggttgcagtgagccgagatcatgccactgcactccagcctgggtgacagagtaagaccttgtctcaaaaaaaaaaaaaaagatctgaattgttgtccccagaacctggtatataaatgttcaagagacatttgcttggggcctgaagcgggggctatgcctgtctttgcagatgtcgaccttaaccctggaagatctctttcccctgtgacatattccttctttatgatgcgggcttcaaatgttatttctttttggaacacatgttttttaatggcttctagcaccaggtgaccttgactcggaattcctagaacacggtacactcggaaagtcatatgggctgtttgttgcagactaaatatttgtgtcctcctctgaccccatcaagttcatatgttgaaatcctgggccaggtgtggtggctcatgcttggaattccagtgctttgggaggccaaggtgggagggtcacttgagcccaggagtttgaaaccagcccgagcaacagagtgaaaccccacctgtacaaaaataagaaaattaactgggtgtggtggtgtgtgcctatagtctcagctacttggatggctgaggcaggaggatcgcttgagtccaggagttggaggctgcggtgagttgtgaccacaccactgtacttcagccgggcaacagagtgagacatatctcaaaaagaaaagaaggccgggcgcggtggctcccacccgtaatcccagcactttgggaggccgaggtgggcggatcacgaggtcaggagtttgagaccagcctggccaacatgatgaaatcccgtctctactaaaaatacaaaaacagtagctgggtgtggtggcgggcgcctgtagtcccagctactcaggaggctgaggcaggagaattgcttgaacctgggaggcggcggttgcagtgagccgagattgcaccattgcactccagcctgggcaacaggagcgaaactccatctcaaaaaaaaaaagaaaagaaaagaaaagaaaagggcctcagcttgctgtttttgaaactgaagccacatgttttcttcctaatcagaactaaagtgaaagattaaaacaatcgatgttttgtttgtcttggagcaagaaatataagatctgtgtttctggcttgcagacaagagcactgccgcactgaagcgtgtgtgggtcgtatatgtgacagagcacaggaggcctgcagcgaggtcccgacagggaggactttcttgggccggagacctggttctgagcacgtcccctggacttccctgagcctcagctttctcggctgtaaagttcagaactagacagcggtttcccctgtgctccacgacaccctaggggttctgtgcagaggctgggccaccctgggttctcgggaggggctctcttggccttggggtacagtctgtgcttcctggtcggactccatttgtgtatgtgtatattttattatacagataataaaatatatatacatacatatttttatttttatttttattttttttttttgagacggagtctcgctctgtcgcccaggctggagtgcagtggtgtgatctctgctcactgcaagctccgcctcccgggttcacgccattctcctgcctcagcctcccgagtagctgggactacaggtgcccgccaccgcgcccggctaattttttgtattttgtttagtagagacggggtttcaccgtgttagccaggatggtctccatctcctgacctcgtgatccgcccgcctcggcctcccaaagtgctgggattacaagcatgagccaccgcgcccggccacatacatatttttagagccaggttctcactctgttgtccaggctggagtgcagtggtgcaatcatagctcactgcagcctccaactcccgggctcaagcgatcctcctgcctgggcctcctgagtagctgggactacaggtgcatgccactaggcctggctagttttttattttttgtagagatgaagtctctacagctatgttgcccaggctggtctcaagcgatcctcctgcctcagcctcccaaatcactggggctgcaagcgtgagccatggcacctggctataataaaataaatctgatatagaatatagaatagggtcataatatataaatgtaatcaacatataatacactgagcatgctcaaagtgtacggttctgatgggacaggaagctggaggcgggaaactggccctggagtgggggttgtggtgaagctggaggcgggaaactggccctggagtgggggttgtggtgttaggctgggacccggttacagtgactgcagggctgacaagaaattatgaaaggtcttgagggaagcgacacagaatttcaaaagaacataatgaatgcactttgggaggccgaggcaggcagatcacttgcggtcaggagttccagaccagcctggccaacacggtgaaaccccatctctaccaaaaaatacaaacatcagccggatgtggtggtgcatgcctgtagtcccagctactcaggaggctgaggtgggagaattgcttgaacctggaaggcggaggctgtagtgagctatgattgcgccactgccctccagcctggacaacagagcaagactctctctcaaacaaaacaaaacaaaacaaaacaaaacaacaatgaatggagaggagaaaagctgcagtggctacggaggccctgatgccatggatggtaaactggtatcttctgacgatgatgactttattgtaaaaagagaacatacacgagcatcaggaataaggaaagccgtgctgagtggcccaggtcagtctgctgagaatgaaaccgaccaggtcaattttagagagatccctccacgatgctatccaaagcatgcgtcaggccatcagcagtggtggtgactcatgcctgtgatcctaccactttgggaggccaaggctggaggatcatttgaggccaggagtttgagaccagcctgggcaacatagtgagacccccgtctctgcaaaaaaaaaaaaaaaaaaaaattagcctggcatggtggtgcacacctgtagttccagctacccgggaggctgaggcaggaagactgcttgagcccaggagttggaagctgaagtgagctatgattgcaccgctgcactccagcctgggcaacagagcaagaccctgtctttaaaaaaacacaatagaaaggcatgcatatattttacttacaaggttcactactctaacagctccactgagattcctgaattcctcactgcattggaagtgctgatggcttcagacttcctagatatatatatttttcttttttttctttttttttgagacggagtctcactctgtctcccaggctggagtgcagtggcgcaatctcagctcactgcaaactctgcgtcctgggttcaagccattctcctgcctcaacctcccgagtagctgggattacaggcgcccgccaccatgcccggctaatttttttttgtatttttagtagagacagggtttcaccgtgttagccaggatggtctcgatctcctgacctcatgatctgcccacctcggcctcccaaagtgctgggattacaggcgtgagccacggcacccagccctagattgttaaataaattataataaactgttaactaatttaggtatttaatacttgtagtttagttagtaatttttcatatattgcatgttcctgtaaacaaatgaactataaactgcgttgcaaagcagattatcttctgttttttccttgcatagtaatcagaattgaaatttgtttgtgacgacaataaattaaggatattttcacaaactgagaaataaacatatataccaactttttttttttttttggatggtgtttccctcttgtcacccaggctggagtacaaaggcgtgatctcggctcactgcaacctttgcttcctgattcaagcgattctcctgcctcagcctcccgagcagctgggattacaggtgtccgccaccacgcctggctaatttttgtatttttagtagagacggggtttcaccatgttggccaggctggtctcgaactcctgaactcaggtgatctgcccgcctcggcctcccaaagcgctgggattacaggcgggagacactgcgcccggccataagctcaattttagacacatacgatatccaatgggggatggacacacacctgacacggtcccagtggagccctgaatggacctctgtgctggaggctgggtgtcgtccctcccccagctgccctgtctcattggccaaagggtttagggagaacaacctagaggccttgctcatccagtggcctaaagttctgcattctaaatacacaccatcgcaggaactcacacctctcctttctccttcctgcctccctcccttcttctttctctctccctctccttccttccttcctccttccctccctccctctttctctttctttcttctctctccctctccttcctgccttccttccttcctccctccctccttctctctctctttccttccttttttctttcttctttctttctctttctctctggctctccctccctccctccctcccttccttccctcctccctccctctctctctctctctgtttctttctcaatttctttcttttcttttctccttccttccttccgtctctctctctctttctttctttttcttctctgagaaggggtcttactctgttgcccaggctagagtacagtagtgtgatcccacctcactgaaaacttgaactcctgggcctaagccgttctcctgccccagcctcccaagtagctgggaccacaggcacacaccaccatgcccccctaattttttaattttttgtagagatgggggtctcactatgttgtccaggctggttttgatctcctggcctccggtgatcctcctgcctcagcctcccaaagtgctgggattacagacggagcctccacactcggcctgtgctctaagactgattcttgccgggacccttagcccgacggcgtgcccagcctgtgcagagggtgggtgcgtgggcccctgctcgggggtgggtgggctgaatccaggtgtcctgggctgtaaagccaagaagcagacagcaggcctggggtggttggagattttgcggggaccctgggggcgctgaggctggagcatcccgagaagtccaaacctgcctggcctgtctctgccgagcagacagcgaggcccgccgggcagcgggacagactggcttccctcctcccggggagacctgccggagcaaacccagctccttttttaggtctgtgatgccacggccactcttggaggtgttttccagctgcacaggaagccgtgacagcgagacccagagaggctggcggtggctctgaattccaagcatagttctcatagttgggaaagtgccactcccggctcgataaaccgaccaggagccgccgccgccagggccatcttctcaccagcagggagagagcatgcagccggtggaggcttctgagagctggccggggcggcctgcgtaaaaggacaggaatgtcaagaatgcacccggcctggcagagacagggactttaccgagcggctcctgggcctggcggccagagaggcgagggagcgggagctaccgagggttcctccatcggcagggaaggtcctgagtcccccagaccctgttaaaagaggctgatcaggttgggtgcggtggctcgtgcctgtaatcccagcactttgggaggctgagtcaggagaattgcttgaggccaggagttcaaagccagcctggggcaacacagtgagaccctgtctctaaaataaaaaaataaaaataaatgttcttggggaagcgaagccgaatttcaggagaacataatgagggtgcagtgagctgggatggcaccactgcactccagcctgggcaatacagcgagaccctgcctctaagtaaaaaaatcaaggccgggggcagtggctcacgcctgtaatcccagcaggttgggaggccgaggtgggtggatcacgaggtcaggagttcgagaccagcctggccaagatggtgaaaccccgtctctactaaaaatacaaaaaacaaaaaaattagcctggcatggtggtgggcacctgtaatcccagctactcaggaggctgaggcaggagaatcgcttgaacctgggaggcggaggttgcagtgagccgagatcacgccactgcactctagcctgggcgacacagcaagactccatcaaaaaaaaaaaaaaaaattaaaaggtaagctgggtgtggtcgcacaagcctgtagtctcagctactccgggaggctgaggcgggaggatggcttgaggccaggagtttgaggttgcagtgagctagggtttcaccattgcactccagactgggggacaaagtgagactctgtctcaagaaaataaaaataaaataagaaaggctgatcagggccgagggctgagatgggaagaaatggtgcttctgtacccagtgctgctgggcctcctgtctggggctggctgcagggcggcccttccaaagagctccctgtggcaggtgcacagtcgggccttggctaggctcatgggaggcagcgctgtgtgttctttttttttttttttttttttttttgagatggagtcttgctctgtcacccaggctggagtgcaatggcgtgatctcggctcaccgcaacctccgcctcccaggttcaagtgattctcctgcctcagcctcccgagtaactgcgattacaggcgctcacaaccacatccagctaacttttgtattttttagtcgagacggggtttcaccatgttgcccaggctggtcttgaactcctggcctcaagcaatccacccaccgcggcctcccaaagtgctgggattacaggtgcgagtcaccgcgcctggcctggggtgggttttttcatttgtgcactgaatgtttattactgacagccagcaaggaaagggggactgcgccctacgactgcaaggaagtgaattcaggaagaacctgaatgagctggggacgacaactggaagcttcgcgtcagacagcaggcggctcacgtttcagtttcagcctgggagaccctgggcagaggacgtcattgcaccatgacctccagaactgtaagctcaggcaggcgtgttgctctaagccaccacatatgcagtagtttcttatgcagtgtaaggagctgatacgcaaggccaggatgggactggttggggtctccaggctggagggccccccggtgagcaggcatggggtcccacagcccaggacagcttcagctcttatttgccatctgctgctgctaggtgttagacgctggactgagcatgctgcacacatcatctctgctgttttccttttttttttttttttttggtggtttttgttttgttttgttttgtttttgaggcagagtctcgctctgtcacccaggctggagtgcaatgacgccatctcggctccctgcaacctccgcctcccaggttcaagtgattctcctgcctcagtctcccgagtagctgggattacaggcatccaccaccacaccaggcttattttttatttttatttttttgtagagacagggtttcaccatgttggccaggctggtctcaaactcctgatctcaagtgatccacctgccttggcctcccaaagtcctgggattccatgtatgagacgccgtgcctggcctcctttttttttttttttttgacacagggtcttgctctgtcacccaggctggagtgcagtggtgcaatcacagctcactgcagccttgacctcctggcctccagagatcctcccacctcagccttctgagtagctgggactacaggtgtgcaccaccatgcccggctaatttttaatattttttcttttagagctggggcctcaccgtattgctcaggccagtctcaaactcctgggctcaagcaatccctctgcttcggcctcccaaagtgctaggatcccgggcatgaacccccgctcccggcctgcaatttttcttttcacagccctgagatgagggtgcagcattaaaacccgtgcagagggtggctgcttctccatgagccgagcaaaccgtcctcccatggctgcttcctgtaaaccggctcctaaggccagcgggcgtttgctctcctgacggcacaggaagtcaggctcagcgaattccagctcagagcgggctctggcggcttccaggcagctccacaatgaggcggctgcgcttttccagtctgctcatcaaagcagagccagccttgtgtggcgcggcgtgccggggtgagtcagccccgggggaaggtggccttgaaggcgggaggggcggccggcctgcagcagcaacgtgagaacagaagcaaccttcatctggctctaaaacttccagaaccagtagctttatagctcgcagagctcctggactctttcctcctgggggtctggcaatcccccacctctcacccctccaaacctctgcctgcctcgaaaaaggaaagaaaaataaaccccaagcaacaaaaccagcaaccagatttggcaggaggggagacaatgcttggagtggaaacgtcagcccttccccgtggagggatgactgcttctgagaacacagtgttcagagacaagagagacagggtgttatgtttagagaggaaaagatccaaacccaaacaaaatggaacagtagtttgggagagaagagaaggctccgaggcactgtgaggaacaagtcgccttcgtacagtggctggggcagctgggtttgcagagagctgtgtccctgggcacctgcgtcaatgtgcacatctgcacgcctgctgtgggcacgagggcctcagccatgagcacccccgggagccatgaggacctcagtgcatctcacagaagcccctgaggacagtgtgcagtggcgcgatctcggctcactgcaacctccgcctcccgggttcaggagattctcctgcctcagcctcctgagtagctggggttataggcgccccccacccccaccacgcccagctaatttttgcatttttagtagagatggggtttcaccatgttggccaggttggtctcaaactcctgacctcaggtgatctgcccaccttggcctctcaaagtgctgggattttaggcatgagccaccgtgctgggccaacagtggctcttaattgggggggtgggtgattcagccccgccaggaaaccctgggcgatgcctgagacatctgtggttgtcggggttgggggagctcctggcatggagtgggtggaggccaggggcgctgctcagcaaccgtaagtgcccagcacagcctcaccccagagaaggatcttaccccactgtccacagtgctgagggagaagaccctgagttaattatttggggaaaatggggttcaatccctacccacactagaataagctcccaacgggatggatggtgtgaaccagggggacccccaactcctgggattcacctcctctctccctcccagctcggtgtggatttcattgtgtgcagcctcctgggacctcagcacagcagaggatcatgggacgcagagtctcttgggggtccgtggaatcccctatccctgggggtttcacctagaggtaattccgtcccccaggggaccctgggcgctgtctggcgacatctgtggttgtcgtaactggggggtgctcctggcatggagtgggtggaggccagggatactgctcagcaccctgcagtgcccaggacaggcccacctcagagaacaatctggccgccatgtctacagtgcctaggggaccctggtttagactctgcagaaaggtgcacacataggccgggcacggtggcttatgcctgtatttccagcactttgggagaccgaggcgggcggatcacttgacgtcaggggttcgagaccagcctggtcaacatagtgaaaccccatctctactaaaaaaaaaatcaaaattagctgggcatggtagcgcatgcctgtaatcccagctactcaggaggctgaggcaggagaattgcctgaacctgggaggcagaggttgcagtgagccaagattgcgccactatactccagcctaagcaacaagagcgaaactgtcttaaaaaaaaaaaaaaaaaaaaaaggccaggtgcagtggctcatgcctgtaataccagcactttgggaggctgaggtgggtggatcacctgagatcaggagtttgagaccagcctggccaacacggtgaaaccccctctctactaaaaatacaaaaaaattagccgtgagtggtggtgggcacctgtaatgccactactcaggagtctgaggcaggagaattgcttgaacccgggaggtaaaggttgcggtgagccaaaatcgcgccactgcactccagcctgggcaacggagcgagactctgcctcaaaaacaaaacaaaacaaaacaaaacaaacaaacgaaaaagaaaggtgcacacagcttccagagcggacacagggcatcagggtgagaaggcacagggcaacgatcaggcgttgatgtgtcccctggcagctgggatgcaggccccccacggcctgccatgttctcaccaggacgccaaagaggggacccacgcagagcccggggagcccgactgaaatggaaacttcaatacaagagacaggtctgagactggccacacctgctgcccgctccacagaaccccagggccccctcagcaaccagggtctgcatgcagagaccctgcacccagcgtgggcacccaccctgcacctgcagcctctccagggccaggtcgcccagcagggcctgggagggcggctgtgtgtggggccttccgtgccagctctgaccgttggtggctctgtgacctcaaggcagggccgtggggcccagggctgcgggcgggagggcctctgccacatggaagggagggccgcactggctggaaaatagtgccttgtgactgtccctgtcagtgtgggccctttgctctcaggctaaatcggtccccggggcagctatatttagaaggggctaaagagagggaatgaatgaggtgcccacgagaaagtgaaaaatagaccagcggggcaggtcccgccgctgccttcagccggagcttggagcctaagaatgagccggcttgttcagacaaagaggccgcgacgacagagggtgacgcgccgccagtgtgggtttggtcgccgcggtgacgggagcaggagaaaagaaaagctgctctctgtccacccggcggtggggtcggcgggggcgggggatgaccacggtcatgtgagagtttgcaagcccgggaaccggggccgggccaggacactgaaccccgtggctcctgtcactccagttctgggcttcccggctgaggaaatgctgtcaccctggccccgggccagggcaaggggcagcgccggcctcgtgacggtggtgctcgggagctgaagggcaggagggttaggaagagaacagagggcagtaccgggccttcccacctcagcacaggtgggtctttctccacgcatgccccccccccagaaaactcctacacatcctgcaaagccccaccgatgtcatcccctctgagaagcccctgattgcaaccatctatgcacagccaggctgcactaaaaccccttctccgcacactggcagctccctggacgttcgttgtgtcctgtgacattgtggctgctgcacacgacccatgtttctcatctcacagctctgggctcagagtccaacatgggcctcactggtttaaaatcaaggcacaggcagggctggtccctcctggaggctccaggggagaatctctttcccgcctttcgcctagaggtgcccgtatccctcggctcgggacccttcctcccccttcacagacacagcacagcctcttcagtctctctctgactctcaccctcctgcctcctctcgtgaggatcctgtgaggtcactgcgcccccccaccccggatcatccacggtggtgctctcatgactcaggtggtccttcactcaatcccacctgcagagtccctttttccatgtgtggtgacacagccacagctcccagggattaggacatggatgtctttgaggcctttgttctgccaaccccagcacatcccagacactgggtaccaaagatgccacttggatggaaggggctggaggccatggtgcagggagttcacaaagggtgttacttcctggaacccactctgttcccagggccgatctccttcccaggacagaggctcccaggcccaggcagccctcggatgtgaagtgcctgccccacctccatccatagcaggtgctgctgctgtgcatgggcacacgtggcctggtaggcccacccctctgggctctgcagcaggggccggcccgtccgggcacacacatggccaaggatggacctcgagcctggggttctctgctgtggcccgtgggctccaggtcacatcatcagaatggctagaggtcaccagtatcatgtgtgacatctccagggccaccccactccagccctggtgttgttagaaagtcccggaaaactacaggcccagggagcttctccctgagggctagggatcattacggatgttttcatgttaacaatggaaaacaaaaatcaaaaaacaaaaaccaggtatggtggctcacgcctgtaatcccagcactttgggaggccgaggagggcggattgcctgagctcaggagttcgagaccagcctgggcaacgtggtgaaacctggtctctactaaaatacaaaagaaatttgctgggtgtggtggcgggcgcctgtaatcccagctactcgggaggctaaggcaggagaatgccgtgaactcgggaggcggaggttgcagtgggttgagatcgcgccattgcactccagcccgggcgacagagcgaggctctgtctggaaaaaaaaaaaaaaaaaaaaaacctagccaggcccagtggctcacacctgtaatcccagcactttgggtggctgaggtgtgtggctcacttgaggtcaggagttcgataccagcctggccaacgtggtgaaaccccatctctactaaaaatacaaaaattagccgggcctggtggcgctcgtctgaaattccagctactcgggaggctgaggcagaagaatcgcttgaacccacgtggcggaggtcgcagtgagccaagatcgtgccactacactccagcctgggtgcagagcgagactctgtctcaaaaaacaaaacacaacaaaacaaacaaacaaacagcgacaaccccctctcaagaataatctgaccctaatgtcagagatgctgatacccagagaccctggtcgaagggatgttccagccaggagcggctttctcgtgaactgtgcatgttgtttgcatcccgacaggttcaagtgacaaagctgggcaggctgaggccaccaaagggtttcctgggtccctgttcctgccacacaccttgaatcctcaatgccaaggcaactgcaaacccgagggaccccaggggggacactaggtctggacatgaaggtttggcagcaaactgtcaggacccccggagagaaccctgactcctgtgccaacccaactgtgtctggctcaacgctcgacgctcaaacacagcaaacggcaagaaggcaagtccaggatatacgttttggcaaaaatggcagccgtgggggtggaggtggaggaggacatgcacggagggcttaaacagggctgtgtttttttttttttcttttagatggagtctcactctgtcacccaggttggagtgcagtggcggatctcggctcactgcaaactccaccccctgggttcaagcaattctctgcctcagcctcctgagtagctgagattacaggcgcccgccaccgcacccggctaatttttgtatttttagtagagacggggtttcactatcttggccaggctggtcttgaactcctgaccttgtgatccacgtgtctcggcctcccaaagtgctgggatgacagacgtgagccaccgcactggccggggctgtgttttcatctggaggtttgcacggggccggggcattgtaaggctaagcatgggaatttcagtctctcccccagaaccttctggagagacaccactgcagctaccaccgctgcagctaccaggcaccagctgaccaggagggaggaaacacaaggctgctgtgtctggggtcagccagcaggccgggggtgagggcgggggtgacaggggagccagcacacttgttgtgcacaaagttccttgtgacagtgagttcgtcttggcctctgtcccaagatgaggttttgatgacacgcatggaatttctaacaatgaaatggagtgtgtggttttgctcacgcttacatccccttttcttgtctatccaaattccattacgccttttcttgctaatgcagaaacacggccaaatcctgggctgccccaggaagtgccgaggcctctttccgctctcagtggaaaagggaaatgtggctgccttgggtctggggtgccctgattctcagaatccctgtgggatggggaaagagtgtttgggttgagactggctcacaggaagtgggtagaatgcagcagaaggagcggctgggaggcactctctcatccagcccccgtggcgaccctccttgctggcttattttgagacggagtcttgctctgtcgccgaggctggagtgcagtggcgcaatctcggctcactgcaacctccgcctcccgggttcaagcgattctcctgcctcagcctcctgagtagctggtagctgggattacaggcatccaacaccaagcccggctaatttttttattttttggtagagtcgcggtttcaccatgttgttcaggctggccttgaactcctgacctcaagtgatctccgcccacctcagcctcccaaagtgctgcgattacaggcaggagccaccgctcccggccacctctgctcacctcctcaccaagccccagcttctgtgactgtcccccagggagagtgaccatggccctgctgggctctgaggggcttgtgcagatgagcaggtggcctacacagcctgagggaccaccagctgctctgtggcaagtctcgtgactccaatcccgctctgcctctggccagcccccgggccttgccacatcttttggttgccgagcctcagtttccccacctataaaatggggacaatgagccctgctccccagggatcctaggagaactaaaggaattggagcagtggacctggcctgcagggggcacgggagaggtatctgctgagtcgctgagtagggggagctgaggatcagggaggcgtcagtggtggggatggcccggctgctgggaacagggccaggggacttagccagggcccgacgagagctgcctgatgtcattgctggagcctcttgtcatccctcccagcagatgctgcagcatagggacctaatccccacggcacgtggccacatggctggcagcttgagcttgcggcctggagacacctgagccttgcccaggcagctccgtgccacctgccgtccagccacgctgccatcagccagcacttgtgtgtcccagaggacggggctcagggcaggctccagggacctcaccctggccgtttgacctccagcaaaggaggtctggtctcccggtcagaaaacaggagagagggcagggacttctccatggagaatatattcatggagaaggacgtaaaaggatccagaccagacaccacgggcacatgcgacccctcggccatcggccaggttttaaatcatcactgtcttcgtcgtcatcctgagtgtcatttgtgtgggggccgggactagggtgaggccatgcggcactcaccttgggggcaaaatctagggaacgccaaaaagccctgccgtgctggtaaattatattttcatacaatcttttattatttatataaaaatatatttatatgtatttattaatatatatttatctattatctataatatataaatatgcatttataaatatataaacaaatatatatttataaatatataaaaacacatatacatatttataaataaaatatatatttaaaaaatatatatatatacacacacatattttgagacagagtctcgctctggcccccaggctggagtgcaacggcacgatctcagctcactgcaacctctgcctcccgggctcaagtgagttttctgcctcagcctcccaagtagctgggattacaggcatgcgtcaccacgcccggctaattttttttattttcagtagagatggggttttgccatgttggccagtctggtctcgagcttctgacctcaggcgatccacccaccttgacctcccaaagtgctgggattacaggcgtgagccacggcgcctgactgcttgtgtgttcacagctgccccccaacgcttgcattcccgcctgagctccgcctcctgtcccatcagcagtggcatcagattctcatagaagcgtgaacccaattgtgaactgtgcatgtaagggatcttggttgcacgctccttatgagaatctaatgcctaatggcctcgactggccaacatgataaaaccccatctctactaaaaaatacaaaaaatcagccggaaattgcttgaacccaggaggcggagtttgcagtaagctaagatcatgccactgcactccagactgggcaacagagagagactctgtctcaaaacaagcaaacagaaataatctaatgcctgatgatctgtcactgtctcccatcacctccagatgggaccatctagtttttatttgtttgtttgttattgagacagagtctcgctctgttgccgaggctggagtacaatggtgcgatctcggctcactacaacctccgcctcccgggttcaagcgattctcctacctcagcctcccaagtagctgggactacaggtgcccaccaccacgcctggctaatttttgtatttttagtagagatgaggtttcatcttgttggtcaggctagtctcgaactcctgacctcaagtgatccacccgcctcagcctcccaaaatgctggggttataggcgtgagccaccacacccagcccagggaccatctagttgcaggaaacaagctccgggctcccagtgatcccacattatggtgagttgtggaattattttattatatattacaatgtcataataacagaaacaaagtgcacaaaaaaagtaatgcgtttgaatcgtccccaaaccatcctcccggctccaccccccccacctccccactgtctgtggaaaaactgtcttccacgaatccactccctggggccaaaaaggttgaggactgctgccttaaggaaccagaaaaggaagaacgaaggcagccccaagccagcaggaggaaggaaattgtaaagatcagagcagcgataaacgagacagagatgagaaaaactggcgagtcgacgaaaccaaaagttggttctttgaaaagagctaggtgattgacaaacctctagcggggctgaccaaaagcaaaaccaaaaaaaaaaaaaaaaagaggaaataagatgcagataactacacgcagaaacgaaaggaggacattactaccaactgtatggaaataaaaggcattatcagagaacacggtagcattatgaaccagtgtgtgacatccaattaggtaatctacacgaaatggacaaattcctagaaaaacgcgaatgaaacagatcagcgatggtttcaggttcagctcacatctcttagatactgacatgccagcatggtgctgagcatatatatatatacatatatatatgtaatatacattttatatgcaatatatatgttatatattatatgcaatatattatgttatatattatatactatatattatattttatatgtacatctcattacatatatgtacacattacatgtaacatcacattacatatatgtaatatcacatgtaataaatcatatcacatacacgcacatattacatgcaatatatcatactacatacatgcacacgttacatgtaatatgttatattacatacatgcacacgttacatgtaatatgttatattacacacatgtgcacattacatataatatattacatatatgtacatattacatgcaatatattacatatatgcacatattgcatgtaatgttatatcacacacatgtacgtatcatgtgtaatatatcacatacatgtacatattatatgtaatattgcatacatgtacatattatatgtaacattgcatacatgtacatattctatgtaatattacatacatgtgcatattgcatgtaatatattgtatgtaatatattatatgtaatatatattacacatatgtatatattatatgtaatatatattacacatatgtatatattatatgtatatatgtatacacagtggcgtgcacctatagtcccagctactcaggaggctgaggcaaagggattgcttgaacccaggagttcaagattgcagtgagctatgatataatagtatattatagcagtgaactataatatattatatataatatataatatatatatttttttcttttctttagagacctggtctcactctgttgcccagcgtggagtcccatggtgcaatcacaatcacagctcacagtagcctccacctcctgggctcaagtgatccttctgcctcagcctcccaaaatgctaggatgacaggcacgtgccaccacactgggtatattttttaagagaccgggtctcactctgtcacctaggctggagtacagtggtgcaatcatagctcactgcaaccccgaactcctgggttcaagcaatcctcttgcctcagcctcctgagtagctgggactacaggcgcacgccactgtgtatacatatatataggtatatgtgtgtataaaatatatatgctatatatatatatatatttttttttttttgagacagagtctcactctgttgcccaggctggtgtacggtggcatgatcttagctcactgcaacctccatctcccaggttcaagcgattctcctgcctcagcttccagagtagctgggattacaggcacctgccaccatgccctgctaatttttgtacttttggtagagacggggtttcgctgtgttggtcagcctggtctcaaacacctgacctcaggtgacccacctgcctcagcctcccaaagtgctgggattacaggcgtgagccactgcacctggctatttttatatttttgtatctatatgcttgtttaatctttgcaaccttcctgcaaaacggagaacgtcatctccactgcagacagttgacgcgaacccacccaaacggggcagagctggtaaaaggggatctgggatttgaactcaggtttcctggctctgagcccggagcccttttatgggatgactcaacctcccaaagtgtcaggcacacataaaagactggggcttgtttgttcctttttctaaaaaacaagagattccaacctcatgaagtaagagaaaatgccacataccttttttagttttcccaggaatcacagcttgctgtacaccctgtttaaaaaaggagagagaaagagaaaagcatggttacatattttttacttacaaggaactcacagagctacctccagcttttatcggagaacgacgttgctgtccccaaaaatgaggcatgggaattcgaaagggccgtgccctccggagaaaacgggggcagaatccactttattctttaccaccgatccgtgcggagaagacctggatgcttctcttgctggacaacagggcaaattatcttccagaaacttgtgttattccatttcagaacaaggaagccccaaccccacagtcaaagtccagtccatcagacacaccagtgcaagaaaaacaaaatacccaggcacggcgccttcccatggaatacttcggtgtttttccatctctgatttctacttttatgtaagccacgtgccgggcaaagggagaggtggaaagtggaaactggggacaaaccaattaaccccgaatggaggaagtgacaggtatacggggggcaggaaggccgggggtctcatgtgagccgcccagggccaggaggtcaataggaaggaaagaacgtctccaggccccggtgattggtctccgggggtcggggcggttggggcctttggagctgcggttttccatggaacggaatcctctgttccaagccggaccctgcacagggccaggccccgtatccgtctccaatgcacagtgcacggatcgcgagggggggcccacggccgtctccaatgcacagtgcacggatcgcgaggggggcccacggggaccaccttccgtggtctttcctgactcccactaaggtctggagggagatccaggcagcgatctgccccctccagcttcgcggcagcctcctatttcgtggacaaggaggcccgaggcaggcaaaggcccctgccttgcggagcgtctacaccggccgaggtcatggggccgggacttgcgcacaatgaacccagatgccaggttctgtgtctcccggttaggccaccactgctctgctgctgagccggcagccccacttggagaagccaggagctgcaccactgtcagctctaggggaggccccgtcctgcctagcggggctcaccctgcagtgggcttgcccggcgaggtcagcagacgcccctgcaccgggcccaacccaggcccagcttcctgagctgctcgaggccgggctgggccgggttcacgtggccaaggctgtttccctcctgccctgaagggcccctgtggtctctgaagccggccaggcccctcttccgtcacaaacatttgctatttccacaaaccaatgggtttttttccaccgacacaaagaagagccacatggctgctgctcctgggctggagtccgggccacccacacacgacactttctcagcagccctgcgccccggggctgcattggaggccaaggaagctgaggtcggcgggaagcctcctcaccttgcagcccagctggggaggccgagtcccggctttcccagaggctcccgggtctcagctgcaggaaggcggtgactgaggtcaccttctcctaagccagggtctctcctcccacccagcaatacggacaccagcgccggattgttctccggggcgggagcatcctgggctctgcagggtggtgagctgcgtccctggcatccacctgctccgtgccaggagcaccccccagatgtgttggccacaaatgtccccagacactgccccgggtcccctggggggcagaatcactccgtgtgagatccctaacctcttagtgacctagagacatccaggggggctgcctcccctcccacctctacacacacacacgcacacacagacacacgcacactcacacacatatgcacgcacacagacacacgcacacacgtgcacacaggaatactcagacacacgcacacacgtacacacgtgtactgcacactcacgcacatgcacacaaagacacgcgcacacacgtacacacaagacacgtgcacacacatttgcatgcacacacagacacacatgcacacacagacgcacatgtgcacacacacgtgcacacacatttgcacacacagacacgtgcacacacagaggtgcacatacacgcacagacacacatgtgcacacagacacacacatgtgcacacacacagacacacacacacgtgcacgcacacatgcacgcaggagcgagcgcctccacccagccctgcatctgaagcaaggtcctgctagtaaacatgcacagactcaagaaacgaggggctgcaggacttttcctcctcctgcccaaaggcacctgcactcacaaaagactcagaggctccgcctggccgggtcagcgaatggagttgtagcaccgtttcaggaccgtgatagagaaagacgggaagttagacttctgacccatcacaaactctgagtcaaagtgcgatgtgcccaggccagcccggtgtgacctcagctcctgatccataaaatcaggacagtgaccgaggatgctggggccacctcacctgcagccccgggtcagcctcagaacccacaggactttgaccctgccccaggccatggtccttgaccagggaaccacagctccttattctgatggggtgactcggtgcatttctctctcaggcttactttttttctctttgagacagagtctcactctgtcgcccaggctggactgcagtagtgcgatctcggctcactgcaacctctgcctcctgggtacaagcgactctcctgcctcagcctctcaagtagctgggactacaggcacgggccaccaggcctgggtaattttttgtgtttttagtagagagggggtttcaccgtgttagccaggatggccttgatctcctgacctcgtgatccgcccacctcggcctccgaaagtgctgggattacaggcgtgagccaccgcgcccggcctctcaggcttacttttaggtggctggaaatactgcttttcatgtgcacactgtattattttcatcatccttgccacagatgggcaccgtgtttttttgtttttgtttttgttttttttttgagatagggtctgttacccaggctggagtgcaatggcgtgatcacagctcactgcagcctcaacctcctgggctcaagcgatcctccctcctcagcctcctgagtagctgagactacagccacatgccaccacacccagctaatttttattcctgtagagatggggttttgccatgttgcccaggctggtctcaaactcctgggcccaagcgatcctcccaccttggcctcctaaagtgctggatgacaggtgtgtgccactgcacccggccagcaaaaatgggtttaaaggcagatgatcaaaccatgttgtagaacctcaatttttaaaaataagagagtgtgtgtagatgtctggggaaaggataaagtgctgggattgtggatgattttcctctccttatgtgattctcagattctgtaaaatgaagttatataactttctttcctcttctttctttctttctcttttctttcttccttcctttccttctctttctttcttttttctttctttcttctctctctttcctttttatttatttattattttttttgggacaggtgtcattttgtcacccaggatggagtgcaatggcgcgatctctgctcactgcaacctctgcctcctgggctcaagcaattctcctgcctcagactcccaagtagctggcattacaggcatgcaccaccactcttggctaatttttgtattttcagtagagacggggtttcaccaacatggccaggctggtctcaaactcctgacctcatgtgatccacccaccttggcccccccaaagtgctgggattataagcgtgagccatcgcgcccagccagttatattcctttcatagtcacaaagaatatatatatatacacacacacacatatatatacatatacatatatatccacagttgattagattctcattatttgtggtagttctgttctgtgaagtcaccacaaaaactgagtttgcgaacacaaatcattactcctagagaacatttttgtaggggtagtttcctttgagtttcaggaaactttcctttatctgatcaatacatgacctgttctgtgtgtctttttttttttttttttggagacagggtctcgctctgttgcccaggctggagtgcaatggtgcaatctcagctcactgcagcctcagtctcctgggctcaagtgattctactgccttggcctccagagtagctgggattacaggcacccaccaccatgtccggctaatttttttttctctcaagatggagtttggctcttgttgcccaggctggagtacaatggtggatgtcggctcactgcaacctccgcctcctgggttcaagcgattctcctgcctcagcctcccgagtagctgggattacaggcatgcaccgccatgcccagctaattttgcatttttagtagagacagggtttctccatgttggtcagactggtctcgatctcttgacctcgtgatccgcctgcctcagcctcccaaagtgctgggattacaggcgtgagccaccgtgcctggctcaaaggtgtcttcttgaatgcctatcgatgatgtgagtgttgaatagggcagctgctctctcagtcctgcctgagcaaagcttttctcacctaccagttcctccacgaggccctgagggacacgagaaggggcctcagcacgatgcctggggccactgcaaacagcaaaatcaccaaaaagagcacaaaaacgcaaaccccgaggctctcgctagacagtaatgagggcgtggtccacctaggaggggaaacggggaggcggagcgtggcctgggctcagggaacgcacgtccatgactctaatttcttgtctctctctgcgtgtccaaggataagagggaaagtaccccaggcattgatttggggttcacaaatacacaccaagccggcgaattcgcaaatacggactccgtgaatgacaaaggggactacagtacaaacccagcctgtccctcgcgcccctagtgtgctgagggcctggccgtggcaggaaggaagggaccgcctcagaccccacatcaccccatcccccaggtctgtctcccaccggcccccagggtcgattctcaggagaggaggtccgacctgctttagggggcccaagcaggaccccttacctccacatcttatttctgtgtcccacccagcccttcccttgaggcagtgattctcacctgggagtggccctgctcccaggggaccctgggcggtggctggggacattgtggttatccagacttgggggtgctcctggcatggggtaggcggacgctgcggtgcccaggacggccctgctccagagaaggatccagccccgatgtccacagggcctggggggaccctgaattcattatttggaaaaaagctgggcgcggtggctcacgcctgtcatcccagcactttgggaggccgaggtgggtggatcacttgatgtcaggagttcgagaccagcctgaccaacatgggtagaccccgtctctactaaaaatacaaaaattagccaggcgtggtggtgggtgcctgtaatcccaggtactcaggaggctgaggcaggagaactgcctgaacctgggaggcggatgttgcagtgagccgagatcgtaccattgcactccagcctgggcgacagaaggagactgtttcaaaaaaaaaaaaaaaaaaattatttgggaaaacagttgaatgcaatttctgctcacagtaggcatcagaataagctcccgatggggcagacggtgtgtaaaccagagggatcccagctcctgggactcacctcctctctccctcccccattcaaggtgtggattgcaatgtgtgcagcctcctgggacctcagcagggcagaggatcatgggacgcagagtctcttgggggtccgtggaatcccataacccaggggggctcaaccaggatgattctgctcccaggggatgctgggccatgtctggggacatctgtggctgtcacgactgggggtgctcctggaatggagtgggtggaggccagggacgctgttcagcaccctgcagtgcccaggttggcccaaccccagagaatgacccaggccccaatatccacggtgccctggggagaccctggttaggtcctgtcacagttttggtgtcagcaccactgcccttctgtgcccaggaggggccctgtcctccccttgtcccttcctctctgcaccctggcctgggtctttgaccctcccagctcttagcactcttggacacacaatccccacaagagcctctctcagaaagatagaaatgacactggttggccgggcgcagtggctcattcctgtaatcccagcactttgggaggccgaggcgggtggatcacctgaagtaggagttcaagaccagtctgcccaacatggtgaaactccgtctctactaaaaaaaaaaaaaaaaattagctgggcatagcggcaggcgcctgtgatcccagctactcgggaggctgaggcaggagaatcgcttgaacctgggaggcagaggttgcagtgagccgagattgcaccattgcactccagcctgggtgacaagagcaaaactctgtctaaaaaaaaagaaatgacactggcttctttctcttctttgcactctgaaaagcacctgagagcaaagtgcccagcagaggcagctgccccggggcgacccgagaaacaggaaaccctgtttctgagcttcgcaggctcttctgggagaccagcgggtaatccccttcctccgacatttctctgagaagtctctctgcgttctgcttctcagaaagaaaccagggtccggggcaggcattcacgccctccacccactcaggggtttgcagtaacacccttgggatctgcaggttcacacagagccagagccgtgagtcaccgcagccccggagctgccggggtccccacctgctcagccccaggaacacacatctacagcgggttcctttttcttttctttctttttctttctttttttttttgagacagagtctggctctgtcgcccaggctggagtgcagtggcgcgatctcggctcactgcaacctccgcctcccaggttcaagtgattctcctgcctcagcctcccaaagtgccgggattacaggcgtgagccaccgcgccccgctccttttccttttcttttaaatgattaatactcatgatttctgttcagctgaaagctacactcactttcaatacctacaacagggtttttccccccgggcactgtggacactggggccagatccttctctggggtggggccatcctgggcactgcagggtgctgagcagtgtccctgacctccacacactccatgccagcagcaggtgcccccagacatttactgagtgtaccctggtcaggggggacaggatcgctcccagcgtacactggaatcttaggggattccacagacccccaagagactctgcgtccataatcctctgccctgctgagttcccagaaggctgcacacattgaaatccacactctgagtggggagggagagaggatgtgagtcccaggagctgcagtccctctggtttacaccatcggccccatcgggagtttattctggtgtccagtgtgagcaagggacagattcaatctttttctttttctttttttttgttttttgagacagagtctcgctctgtcgcccaggctggagtgcagtggcgtgatctcggctcactgcaagctcctcctcccgggttcacgccattctcctgcctcagcctcccaagtagctgggactacaggcgcccaccaccacgcccagctaattttttttttgtacttttagtaaagacggggtttcaccgtgttagccaggatggtctcgatctcctgacctcgcgatccacctgcctcagcctcccaaagtgctgggattacaggtgtgagccactgcgtccggcccagtatttttcaaataatgaacacaggtctctcccgttctgtactctggacattgggcctggatcattctctggggtggggccgtcctcggcactgtaggctgctgagcagcgtccctggcctccacccactccatgctgggagcaccccgtagtcgtgactaccagaaatgtccccacattctactcaggatcctaagagaaccactcccaagcattattgaggtcacacttttttttgtttttgttttgagataggtttcatttctgtcgcccaggctggagtgcagtggcacgatcttggctcactgcaacctctgactcccgggttcaagtgattctcctgcctcagcctccctatagtagttggaactacgggtgtgcaccaccacgcctggctaattttggaatttttagtagagatggggtttcgccatgttgcccaggctggtcttgaactcctgacctcaagtgatctgcccacctcggcctcccaaagtgctgggataataggcatgagccaccgcgcccggcccaggtcacacctttgaacacttcagtgggctcattttatgtgtgaatttttagcctaattgtgaactgttgagttatttaaaccttcgcacccaaacttccttggtccagagaggatttgaagctcatacataaacaacacagcagcattgcaaatcaaggaatggaggagacggtgaaggtggtatttgggggtgttgggtggggtgggagaaacagcagggaaaaatcaaaggatggttagccaatgagaatggtgttcgtgtgtgtaagggcaggctcctaaacaggagtgtagctaattttcaactcaagaaaaagaatgtgtattgaatgcagtgggttgaatagtgtcccgcaaaagctcacgtcctcctggaagcttggcacgtaaccttctcagagatggggtctctgcagatggaagatgatacggatcttgggatgaaatcatcatcctgtttgtagggtgggccctaaatccaatgactggtgtccttttaagaaggagagacacaggctgagattggtggctcacacctgtaaacccagaactttgggaggccgaggcgggaggatcgcttgaggccaggagttcgagaccagcctggccaacgtggtgaaaccccatctctaccaaaaatacaaaaattagccaggcatggtggcgtgcacctgtaccactcgggaggcggaggcacgagaattgcttgaacccaagaggcggaggttgcaatgagccaagatggtgccaccgcactccagcctgggtgacagagcaagactctgtctcaaaacagacaaacaaacaccaagaaggagagatttagagatgcagaggagaggacatggctgtgtggagatggaggcagagactggggtgacacggccacaagccagactcctagagcccccagaagctgggagaggccggaaggaccctgcccctggagtctctggagggagcctagccctgcagacaccttgatctcagacttctggcctccaaaagtaggagaggagactgtcacaaaatgtctgttatttaaagccccgcaatctgtaataatttgcatggcactctaggaaatgaatacattggtcatttaaaaaaaaaaaaaagaatcaggccagatgcggtggctcatgcctgcaatcccagcactctgggaggctgaggcaggaggaccacttgagactaggaggttgagaccactctggtcaacacagtgagaccctgtcttgaaatggaatgaaatgaaataaatacaataaaatatccgctaagcttctgtgtctccctgtagccatgacaacagaagaccctgaggtggagaagatgacgccttcctgttggaatcacgggctcagactacatggggaaaacggaaaacacacgtgcaaccctcacacaacgtgtgcaccctgcaggctcaaaaaccaaagctgtgccaggcgcggtggctcacacctgtcatcccagcactttgggaggccgaggcgggtggatcatgaggtcaggagatcgagaccagcctggccaacatggtgaaaccccgtctctactaaaaaaatacaaaaattagctggacgtggtggcacacgcctgtaattccagctactcaggagactgaggcaagagaatcacttgaacccgagaggcggaggttgcagtgagccgagatcgtgccattgcactccagcctgggcaatagagagagactctgtctcaaaaaaaaaaaaacaaaaacaaaagctgtttgcgtcaaaggaagggtcggttagttccttccctccaggactgaatccatgagaactgcagaaatttaggattaggaaccagttcgcccagggttcctaaaacctgcaatcactgggagaggcccatcccacccggaagaacctgattgagtggtctggggtgtgccgggcacagggcagttgagactccaggtgacagttaccggcagctcagggtggaggctgtgtgagcccggccgagtcctacaggaagcgtctgcagagtgtaatgtgctcagcgcttctgcaggggacgggcggaatgatgtgtgcagacattttaaaccatggtagaggccgggcacggtggctcacgcctgttatcccagcacttcgggaggccagggcaggcggatcatctgaggttaggagttcgagaccagcctggccaacatggtgaaaccccgtctctactaaaaatacaaaaattagtcaggcgtggtggtgggcacctgtaatcccagctactcgggaggctgaggcaggagaatcgcttgaacctgggaggcggaggtggcagtgagccaaaatcgcaccactgcactccagcctgggcgacagagccagactccgtctcataaataaataaataaataaatataaaaaataaataaaggggacatttggacacagatgcacacgggagggagaatgctgtatagataggagattggggtgacaaggcagagattgggggtgtcacttccacaagccagggaaggccaaggatctccggccatcaccaggagctgggagtggccctgggatggattctccccactggcttcggaagaacccagccctgcctacaccttggccttggacttccggtctccagagcggagagagaatgaacccgtggtgtctaaacggctaggtctgtggaccttgtacgagcaccccatgaaactcacacaaagccctaaaaggcgtctcagcctggctccgggggaagggtccgagacagcagaccagaactggggccacagcaatggtcgggggacacctccttcccctcccacccccactgctaaaggactggctagaggttgtaaggccagggttggcaacattttcctgtaaaaggccagagagcaaacttctctggctttgtgggtcagatggtctctgttgcaactgctcgactcagccacagaggcaggagaggctgctgtggacgatttctcaatgagtgggcatggtgggtgccaataaaactttatttacaaaaacacactgtcgctgggcatggtggctcaagcctgtaatcccagcactttgggaggccgaggcaggcggatcatctgaggccaggagttcgagaccagcctgaccaacatggtgaaaccccgtgtctactaaaaatacaaaaaaattagccgggcgcggtggcgggcgtctgtaatcccagctactcgagaggctgaggcaggagaatcgcttgaatccgggaggcggagcttgcagtgagccgagatcgcgccactgcagtccacagtccggcctgggcgacagagcgagactccgtctcaaaaaaaaaaacaaaaaaaacaaaaaaaaaacaaaaaaaaaaacacaaaaacaataacaaaaaacccacactgtccatcatgggcccttgctggctgacctctgctctagaatctccttaatttcaagtcattgggttggccgtgatcattcctgtagtgatgcttccagaacacaccttttccatctgcaggtttatttcttctcagttgtcgtcgatttgtgtgtgtgtgtgtgtgtgacatagggtctcactctgtcacccaggctggagtgcccgtggtgcaatcacgctgcctcgacctcccaggctcaagcgacctccctgcctcagcctcctgagcagctgggactacaggtgcacactaccacaccagctaatttttgcatttttttgtatagatggggtttcgccattttgcccaggctggtcttgagctcctgagctcaagcgatcgtcccacctcggcctcccaaagtgctgggattgcaagcgtgagccgctgcactgggccggtgtcctctgtcgtatcctacttaggcactgcctctgacgcttctgtgctccagcggcagagctgagtgctggagccggagactgggccacagagccgaaaacagcaaccctctggccctttacaggaaaagctcgctgccttgtggtctaggatgagacctaaaaggtcacaagtctcctcttcagagcaccagactccgacgggggcagggcaatgtcaactgggcaacagggaagtcacccatctgttcccgggcaccacgcgctcaggcatggaagggagagaagggcgttgccattcagcaggaactcaggaagtagggcgttcacaacgccttcctggaaaatgcatctcaccaggcactccagccacccaaaaacagagacacgggcatgcaagcacacatgcacacacgtgcagatacacacacatatagacatacacacatatacacatgcacacacacacacttacacacatgcacatacacacatatagacatacacacatatacacatgcacacacatacacatacatacacacacatacacacatgcacatacacacacatatagacatacacatacagacatgcacacacgtgcacatacacacatatagacatacacacatatagagacacatatagacttacacacatatacacacgcacacacatacacacgcacacacacatatacacacatatagacatacatacacacacgtgcacatacacacatatagacacacatatacaacacaaacacacacacatatacacatagacatacacacatacatatacatacacacatacatatacatacacacacacatgcacatacacacagacttacgcacatacacagggtctctgtgtgtgcacatacacgtgcacatatacacacatacacatatatatacacacatatacacacatacacatgcacaaatacacacatatatagacatacacacatatatacacatacacacatatatacacatatacacaaatacacatatacacatacacatacacatatatacacatacacacatacataaaatatagacacacatatacacatacagacacatatacatacatacacacatacacacatacacatatacacataaatacacatacacacatatacacgcacatatatacacacacatatacacacaaatatatacacatatgcaaatacacacaaatatacacacaagtacacacacatactcatgtgcacacacatatccacactatacacatatacatacatatacaaatatacaaatacacacaaatatacgcatacagatctgtgcacaaaaacatacacatacacatatttacacacatatacacacaagcagacacatatacacaaaagcacaaacatatacacagaagcgcacacacatacacacaagcatgcaagcacacacacacatacacacaaatgcacacatgcatatacccacaggtgcgcgcacacacacacaactcagtgaagggagaggccccagcatgaggcacctgctggggatcagttccacaaagggtgcagcataactgctggagcaggaacagctacacagtggatggcgatcatctccattctctctctctctctctttcttttttttgtgagacagagtctcgctctgtcgcccaggctggagtgcagtggcgcgatctcggctcactgcaagctccgcctcctgggttgacaccattctcctgcctcagcctcccgagtagctgggactacaggcgcccgccaccacacccggctaattttttgtatttttagtagagacgagggttcaccgggttagccaggatggtctcgatctcctgacctcgggatccacccgcctcggcctcccaaagtgctgggattacaggcgtgagtcaccgcacctggccaatcatctccattcttaaacaaaaagtgtgagacatgacaattatgtcgctatcatactaaatagggtctctcttagcactgtggacactgtagccagaccgttctctggggtggagccatcctgggcactgcagggtgctgagcagcgtccctggcttccactcactccatgccaagagcatccccatcgggacaaccacagatgtccccagacatcacccgtcccccagtcatgacaaccacaaacgtcaccagacatctcccggtgtcccctgggagcaggatcagccccagctgagaaccaccacactagaacaactgcgacaaaaatagccacaaaatcctagaatccagcagcacaggactgagcaatgtcagtgacatggggccaatgtttgtgcctccggatctcacactgaaatgcgaccccctatgttggaggtgaggctgggtgggcggcatttgggttgtggcgggaggggggtccctcatggcttggtgctctcccctcgggaatgagcgagttcccactctgttagttcacggacgacctggttgttaaaaaaagcctggcacctcctccctcctttctctcgctccctctctggccgtatgagatgcccgttcccccttcaccttctgccatgagtggaaacttcctgaggcctcaccagaagcccaggagatgctggcaccatgcttgtatggtctgtagaactgtatggtctgtagaactgtgaaccagataaacttctatgctttataaacccctcagcctcagctctattcctttatagcaacacaaaacagactatgacagtcaggcacggggagacacgcagagcttgactgggcctcaggtcaggaaggaaacttccctttccagccacatgtggatggggcccgtgttcactggggaagtggcatctgcaaacctcagctcttccatctgtaaaatgggcatctccacacccacttagccgagaactcatgagagcaaaggagaagctaaatccctaaggacgcagccccataatgggccccaggaggagcttgagagagacagacagcccaggagccaagtctcagccatgaacagaaggtactggaaggttttccaggagcagacagcgctcctcggacagtggagagatggtaaaggacgtgaacccacaattcacacaaggaaacaaaaccccaagcctaaaaacagatgttcagcttggctttttaattttttgagacagggtcttgctctgtcacccaggctggagtacagtggtgcaatcacagctcactgcagccttgacctcctgagctcaaccgatcctcctgcctcagcctccccagtagctgggattacatgtgcacgccaccacgcctggctaatgtttgtattttttttttttagagatggggtctcactatgttgtccaggtgggtctcaaactcttagactcaagtgatccacccaccttggcctcccaaagtgctgagatgataggcgtgagccaccgtgcccggcggagttgtccagctttaacaaacaacaacacatgcaccaataacaggattccaccctggcctctcggactgtcaccgatggaagcctgacgacgcccagtgtcttctaggatctgcggaatgggggcctctccagcacagataacagagggtccctggtcaacatttttggaagaaaatgtggcggcattgtcggaaccgagaaggtgctacctgctgatgcgacaattccatacctacgaatttattgcaaagaccttgttggacacgtgggcaaagatgtctacctatatccttatccttgttctgattgcagaactgtgaatgcttccaaactggaaccatctcaatctgcctgcagaggcgtggttaggccacgttgcatttctaggatgggtagcgtgcaggggtggcttggagggtgcctgcaggctacgttaagtgaaagagttatcagatgtgtggtcacttttcttttcatttctttcctttttttttttttttttttttttttgagatggagtcttgctctgtcgcccaggctagagtgcagaggtgcggtctcggctcactgcaacctctgcctcccggggttaagtgatcctcctgcctcacccttctgagtagctgggattataggcgagtgccaccacgcctggctaatttttgtattttcagtagagacggggtttcaccatgttggccaggctggtctcgaactcctgacctcaggtgatctgcccaccttggcctcccaaagtgttgggattacaggtgtgagccactgcgcccggccagttgaccgttttatatgagtcatataaaatatgggctacctacctatcctgtcccattggcctatttgtctgttcttttgacaatgccacattgtccctctctctttgtgtttttgttgttttgttttgttttgtttttctttgagatggggtctcactgtgtccaccaggctggagtgcagtggtgtgatcatagctcactgcagcctccacctcccgagctcaagcgatcctcccagctcagcctgccgagtggctgggaccacaggggcacaccacaacaccaggctaattttttgttttttagagacagggtcttgctgtgttgcccaggctggtctttaactcctgggctcaagcaatcctcctgcctcagcttcccacgtatctgggactataggtgcatgccaccatgcttgcttaatttttttgttttttgtagagacgggtttcgctacgttgcctaggctggtcgagcaagtttttaattccttcacagagctgtgcaaccatcaacactacgtagttccaacactttttcttttcttttttttgagacggagtctcgctctgtcgccaggctggagtgcagtggcctgatctcggctcactgcaacctctgcctccccggttcaagcgattctcctgcctcagcctcctgagtagctgggactacaggtgtaagccaccgcgcccggccctttttttttttttttttaagagttaacgatctgttgcccaggccggactacagtggcacctccttatctcggtgaagccttgaattcctgggctcaagcgatcctcccatctcagcctcccgagtagctggggctgcagacatgaaccagcatgcacggctaacttaaaattcttttcttctagagatggggtctcactatattgcccaggctggtcttgaactcctggtctcaagcaatcctcccacctcggactcccaggttgctgagattacaggtgtgagccactgtgctggctgaattccagaactgtttcatcgccttaaatggaaaccccgtccgcattagcagtcacccccgtctcctccaaccacacatccatgcatattctctgtggatctgcctgttctggaaatttctcctttttttttttttttttttgttttgagacagagtcttgccccgtcgcctaggctggagtgcagtggtgcgatcatggctcactgcaacctccgtctcccaggttcaagcgattctcctgcctcagcctcctgagtagctgggattacaggcgccaccacacccggctaattttttgtatttttagtagcgacggggtttcaccatgctgcccaggctggtctcgaactcccaacctcaggtgatccgcccgcctcagcctcccaaagtgctgggattacaggcctgagcccccacgcctggcctggcttccttcatgaaataggtattgaggggaccacagttccgagcccactccccagccaagtttctgcactgatggaggaggcggggctagtcttagggaagcggctagaagacttaagatcttgtctgtaccctgtcccctcacagctgcgtggcttccgacaagctgcttctgcgctatctgtggagaacgatctaaaagtgggattggggctgggggtggtggctcacacctgtaatcccagcagtttcggaggccgaggcgggcagattacctgaggtcaggagttcgagaccagcctggtcaacatggtgaaagagttagtgtcttgttcacggcgaaaccccgtctcgactaaaaatacaaaaattagccaggcgtggtcgtgggcgcctgtaatcccagctactcgggaggctgaggcaggagaatcgcttgaacctgggaggcggaggtggcagtgagccgagatcacgccactgcactccagcctgggtgacagagcaagactccatcttaaaacaaaaacaaacaataaaagtgggattggcatttccctcccgtggtcatatgcgaacgggtgaattaaattctttctggaagaggctggaaaggcactgcatgaatgggacataccgtgggtgccacggaccagctgctgcgaggtacggccggagttctgccgcctcggggaggcctgggtatcccgagaccagagatgctgccttctcaccttgggtgcctgggtctggcccagagcccgtcacacctgggctggtgcagtccaggtgaaacccgccctgccagccacccccaccatctcccggggtgtccctgctgggcctgcattctgacatcacgccttcaaactcaacggtgaggccgcgggaacacgcatctcatatgacgctggagccggaagatggggcttggggctttcagcccttcctctccctctctcttttctcactacaatgttgtgccgccatcaccaccatcctctccagaactttctcctcttcccaaactgaaactctgtccccatgaaacactcactccctgtccccctccccagcccctggcactcactcatcctacttcctgtctctgtgaatctgacgactctagggacttcccaggagtgggatcacacaggatacgtccttttgtgtctggatcctctcactgagcgtgaggtcctcaaggttcatccacgctgtagcccgtgtctggattcccttccttttcatggctgcgtaatattccactgtctggttggaccatgctgtgtttatccactgatgggcgcctggggtggcttccaccctggggctgttgggaatcatgccgctgtgcacttgtgtgtgcaaacacctctttcagtccctgctgtcagttctgtggggtctatccccaggagtgggattgctgggccctatggtaattccgtgtttaccatgtgagaagctgccaggctgggccttgttccatccccaccagccacgcacgagggtctgtttctccatctcctctcccgctcttgtccgaaaccgcacttgttatcagagcctcagcgtcctgcctgttaaatgggctcgtggtttctccaaggctgctggcaggccctgtgaaaggctatcagctccagctgctgttaggcttaggggcacaatggttaactctgagctgtcagggaaccagggaagaaaggctggttggaatctctctttcttttttctttttctttcctttttttctttctttcttttttttttttttagatggggtcttgctctattgcccaggctggagtgcagtggcaccgtcatagcttactgcagcctggacctcctgggctcaagctatcctcccacctcagcctccagagtagctaggaccacaggtttgcaccagcctatccagctaatttttaaaatttttttgtagagacagggacttgctgttgccaggaactactgggttcaagcaatcctcctgcctcggcctctcaaagtgctgtgattacgggtgtgagccacagtgccctgctcgagtctttttgggcatcctttgggattgatctggaaagctccagggaagtgtacaaagcagaacgggcgcctcctcagggcgtgtggacacgcaggcacacgcaggcacatgcagacacgcaggcacacacagacatgcagacacacgcaggcacacgcagacaggcaggcacacgcagacacacgcaggcacacgcagacacgcaggcacacgcagacacgcaggcacacgcaggcacacacagacatgcaggcacacacaggcacacgcagacacgcaggcacacgcaggcacatgcagacacgcaggcacacgcagacacacgcagacaggcaggcacacgcagacacgcaggcacacgcacacgcaggcacacgcagacacgcaggcacacgcaggcacatgcagacacgcaggcacacacagacatgcagacacacgcaggcacacgcagacaggcaggcacacgcagacacgcaggcacacgcagacacaggcacacgcaggcacacgcagacacgcaggcacacgcaggcatacacagacacacaggcacatacagacacacaaaggcagacacatgcagacacaggcacatgcaggcagacacacacatgctcacactcaggtacacgcagacatgcagacacacacacagacacacacagacacatgctcacactcaggtacacgcagacatgcagacacacacacagacacacacagaaccagacacacagatgcatgcagacacacacagacacatgcggcacgggcacgtgctcccagagcaggagttgtgaggctggcaggctccaagactgagtttcccaacccaccgcagtggggcggcctcggatgacgtgcaggcgtgcagcccggacggccccaggggactgcagcaaaaacaaacatgccgggttgattccagcagaacccttcgacccaggcctgcacacggtgtgctgggaatccgccctgggtggggctgacccactccctcctagagttcaccgtggtccctggatgcttgctgaccccagggaggacagggcgggccgcggcaggcgggggacgggcactgcagcagctggtggccaccctcacacgtctgggaaaccaggaacccttgggaactaaacttggtcttttttattttattatgtatttatttatttatttatttaagaaacaggggtcttgcttcactgcccaggctgagtgcaggggtgcaatcacagctcaatgcagcctccacctcctgggctcaagcgatcctcccacctcagcctcctgagtagctgggactacaggtgcgtaccagcccatctgggtaatttttaaaacttttttttacagatggggtctccctgggttgcccaggctggtctcaaactcctgaacgcaagcgatcctgctgcctcagcctcctgagtagctaagattacaggagtgcagcatcaccctggctaatttttaaaatttgttctaaagacagggtctcgctatgtggcccaggctggtctcaaactcctgggctcaagtgatcctcccacctcagcctcccaaagtgccgggattacaggcgtgggcctctgtgcccggcctgaatttgctcttaagtcattcacgctacgtgagtcaccagggctgtcccgtgtgcaaagttccagtaagtctttgtattcctgttggcagggtcaggacaaggtccacctcgcaagctggggctgtggggcagtgagctcagtctctgtgttgcgtaaccaattgccatccatgtggcgccttccaacacacatccacttagtacgtcacggtttgtggggtcaggagtccgggaacagccaagccagggcctctgttcagggtacccccagggctgcagtctgggtgttggttggggctgcgtctcatccaaggctcgcccggggaaggctcttcatccagcattccctcaggctgttggcaccatttgcctccctgtggttgtaggaccggggtccctgtttccttgctggctgttgcctgggggacactcccagctcctatgggccacccttgggtcctagctatcagaccctcctcgggccttctcgcaatgcaccgctcacttcttcacaccaggaaccagcaggggagtgtcttcccacaactctgctaagctagagtcttctgggtgggcgtggtggctcacgcctgtaatcctagcactttgggaggctgaggcaggaaaattgctttaagccaggaggcggaggttgcagtgagccgagatcacgccactgcactccagcctgggtgacagagcaagattccatctcaaaaaaaaaaaaaaaaaaaaaatcagcgtaatattttacatattatatatgcatgtaagcatttgctacatatttatattgagaaataaatctaaaaagaaaatgtagaacatccctatataaaatgttatggtgttattttcctttttttttttttttgagatgaagtcttgctgtcacccaggctggaatgcaatggcgcaatcacagctcactgcagcctcaacctcccaggctccagatcctcccacctcagcccctcgagtagctgggaccacaggtgtgcaccaccacgcccggctaattcttttatttttttgtagagacggaggtctcgttgttgcccaggctggtcttgaactcttgggctcaagtgatcctcccaccttggcctcccaaagtgctgagattacaggcgtgagccaccgcgcccggctacgtgcttgtcttattcagcattatgacatcatagagggtgctgattcttaggggctttgagggtctctgagggctttgaggctcagagatctgctgagacacaggtagcgtaggcagagctgggacaaatcccccgttagagccgggggccctcggagaacccaatacgggacccagaggaccgagggcagcctagtgccaactcctgactcgccctgttctctactatgttaggaagctatttgcagttttgtatttgatagaatctcttcctgaatgcttgctccgatcctttgtggaatgaggcagaatataaataaatcaacagaaaacggtgctccagccacaagcaagagactgcccgtcctgcagggcctaaggaattcacgagcaacgcccgcccaggggctgggctcaatggctggcagccacaggtttcatcgctaaccaggccggagaagctgggcagaaaagcacctgtttgcagcttttcagcaggacctctccccctcagccctgtggacattggggctggatccttctctctggggtggggccgtcctgggcactgcagggtgctgagcagcgtctctggtctccacccactccctgccaggaagccccccaacaccccgagaccaagaatcatcagcttccaaatgttaacatgcacaagtagggaaaccgatgctaaaggattttaaggtcacagagctgggaaggggtggatcggggcctcaaacccctggctcccggccccccaggggccgagctgtggggatgtggatcccagactgaccccggcatggaaaaccaccagcgtggcccggcgccagacctgcttgtctgtcgcttgtctgcgagaggccaggaaatggctgggagagggagagacggttaaacgaaaaaacatcccaagaatgcacatggctcgtctccggccctggcagcccgccccgccggtgcctgcagcagagggtcccgtgatttggggctccgcctcagcatctgcgggatgggtgcccccggccgggcaggtccagacgccaaggtctgcacaggggtcacccggacacacctgactcggaccatgtggctaagtttgttttgaaatttcactgccccagcgtaacccagagtccaggccacgcccagcacggctggctcccgtccgggtctctgtgtcctgcagctcagggtggccagggcgggcgggcaggagggcaggcacctggcacccacccagacctgcgccctggccatcaggctgccccgggaagccgggcgaccgggaagatagcagagtcaacagggcgggtgcaggaaagggcgctccccatgcgagcctctgaagccctcggcacacagccctggaggctgggaatccttgagcgttttcctctgaggtctccaagtgtttatggtaacaagaggagggaggagggcgaggggacggccgccgctgggcagcagctccgcctgctggtcaccttcctcggggacatgcaaggacaagctgccgacggaaggggctttggcagaaatgcggggagcaggggacgcacccccacggacaggggcttttctggttgccaaacgtgcagacgacgggcctgacatccccatttcccaggaactctgtggatgggtgtcctggggctgccgtaagaaagtgccacaaatgggggactgggagggggtcttaaaaccacagacatggatcctctcccagttctggaggccagaagtccaaaatcatggggtctgcaagcctgtgctccctccagaggttccaggggagaacgctttctgcctcctccagttctgggggcgcaggtgtctctcagcttgtgtcctcctcggacacctggccagaatccactaggactttaaaaaaaaccattgcacccccccagtgccatcccagaggacccactcaataaacactggagcaactcccagggcaggggaatgcaggtgtgcccaggggtcagggcccatacacgcagctgagtgagccctgccaaccctaccagtcccagtcctggcccccgacattggtcccggcctggcctgctcaccccttcatgcctctctgtctaaggggcagggataggacgcagccctgctgctctctgtctggttctattttttttttttttttttttttgaggctgagtctcactctgttgcccaggctggagtgcagtggtgtgatctcggctcactgcaacctccgcctcctggtttcaagagattctcctgccttggcctcccaagtagctgggactacaggtgcactccaccatgtccggctaatttttgtatttttagtagagacgaggttttgccatgttagccaggctggtctcgaactcctgacctcaggggatccacctgccttgacctcccaaagtgctgggattgcaggcatgaaccaccgtgcccagctctgtgcctggttctgttttattttattttagagacaaggtcttgctgttacccaggctggagtgcagtggtgcaatcacagctcactgcagcctcaaactcttggcctcaagggatcgtccccactcagcctcccaagtagctgggactacaggtgccaccaagcccagttaatttttacatttttttttttgagacagagtcttagtctgtctcccaggctggagtgcagtggtgcaatcacggctcactgcaacctccccctcccaggttcaagcgattctcctgcctcagcctcccgagtagctgggattacaggtgtgcaccaccacgcccggctaatttttgtatttttagtagagacagggtttcaccatgttggccaggatggtcttgaactcccgatcctagatgctccacccgcctcagcctcccagagtgttgggattacaggcgtgggccactgcgcccggcctctgcctggttgttgaggcagagactggtgtcttcttccctcgtcttcccctcatatcaggcctcaagaaagacttccatgaacgctgtgggaaaatgcactatgatgtccctcactagaagtgccttcgccgcaggcccagcctgaaagtgattaatctctgcttcctcctctcccctcccccaacagagtttgtctaaaagtgcccagaggcctgggtgacagactgatggggggggccgcgggggtggaggggtgatgggggtgggggggtggggggcggagggtgtctctcgggtggcctggagcaccagcagtcaattccttcacttgcaaattgcccaggaggggtcagcagagatactgagttcccaaaccacaggggggtgagaacaggtctgaggctgtggggtgggatgtgggggccccctccctggtccctggtgttgtttaccaaacacagcagcaaagctgtgtctgcagccaggacgcctgcagccaagctcctggctgcactcccaatgcccacttctgcacgtgttttcaccccaccctgcagggatgggacacctccccttcttgagggtgaggacactgtgacatgttcctcaacaagatgcctggccaggccccattcactctgcatcacccaacaggtgttgaaacaacgcatgaaccgtgttatggtctaaggtgtaggctctactcaagataggcacaactttgtggaataaaatatcaaggtttcacaaggtgacaagtggccagttgctcaatttgtgttagagaaacagagaatgtctgggaggggacagggaggtgagaacattttgtggagggtttggcatgcagcctgtgccctataaccctcactttaagccagggtgccagcatcatcctatgtcacctaccacccatctcttgaagtcatcaccaaagtgaaaaagcaaaatggaaatactttgccaaagggacgagagacaaaaagttgaggtccttaatatataaagatctccaaaaaatcaataaaagtgaacaaaccagcttaataaatgtgggatcctggatcagatcatggaacacaaaagcacgtggaaatggaaaaaaggatgaaatttgaatcagccctatacttaatattgcagcaaggttgatttttttagtggtgataaatgttctgtagttatggaagatatcagccaatgggaagctggatgaaaggtgtaagggaacactctgtactatttttgcacctcttctataattcacatattatctcaaaatgtaaaaaataaaattgttaaaagtgaacataatccacaaaaagcattataaatgttcattatgaaaactttcaagctctccagtaataaaaaagattatagatcatacaatgagctgttacttttagcctttaaatgacaatttttttttttgagacagggtcttgctctgttgcccaggctggagtgtagtggtacaattgtgcctcactgcagcttggacttcctgggctcaagagatccacctagctccaccttccaagtagctgggactacaggtgcatgccaccatggctggctaattgttaattttttttttttttttttttttttttttttgagacagagtctcgctctgtcacccaggctggagtgcagtaacttgatcttggctcactgcaacctccacctaccacgttcaagcgattctcctgcctcagcttcccgagtagctaggactgcaggtgcaagccaccatgcccagctattttttgtatttttagtagagatggggtttcaccatgttggccaggatggtctcgatctcttgacctcaggtgatctgcccacctcagcctcccaaagtgctgggattataggcgtgagccactgtgcccagccaaattgttaaatatttttgtagagatggggtcttgctatgttgcccaggttggtctcaaactcttgggcttaagcaatcctcctgcctcagcctcccaaagtaatgagattacaggcatgagccactacacctggtctaactggcaagtattttttttttaaatagataatatccagggatggtcaagttgtgataaatcatggactagcagacagtgggtggaggacattggaataactgttcttgaaagcaaatctccctctggaaaactgtcctaaggatatttttctttaaacctttgtgtgttttctgaaaaaattttttagcaacaagccagtgttacttttgtaaacataaagttgtactattttgatgattaaaaatggacctctcaccccctttgtagactgtggaacccgggctggctcagcacagtcttgcagccgtcttcatggggtgaggttggggaggaccaagagctctcaccttcgactgccccaccctccagctttgcccgccccagcccaagctgtgtggcaagaccccttgttggtgcaggtgctgggggctggtggctgctggcattcccaccttctagagtgactttcacacttcctgatgagtttcccattccgctcagcaggcccataaataggattgtgcagaggtgcatatgcaagcactttacctgaagaattattatggataaaagtaaagaaataataaacaacttagatgcctcccttgagcccaagagtcccaggctacagtgagccctgatggtggcactgcactcctatttaatttaggagattagttcagtaatctgtggtacaaccaaaagataaaacacttaacattcactaaaaaggatgtcgcaaatccatatttgataatgtggaaagattcccataatatattgctaaattaaaaaaaacagattaaagaacagtatcaatagtgtgattctatgattattcagaaaagtccatacatgtgtgggtgtggtgcatattttttaacagtacatgtttggaagaactaaaagtcaccaggatgggttggagaagaggttggctccaggactgaggcagaaaaaaatattatatttctggagcatctttttgggccagaaagtaaggaaactcaaagaattatggcaacgtatcagaaggacacagagccagcttggctgggtgccagtggttcatgcctataatcctaccacttcgggaggctgaggtgggaggatggtttaaggtcaggagctcaagaccagccagggcaacatagggagaccctatctccgcaaagaattaaaaaaaaaaaaaaaaagcgatggcacgtgactgtagttccagctacttgggagactgaggtgggaggattgctagagcccagaagtttgaggctgcagtgagctgtgattgcatcactgtactccagcctaggtgacaggcaagaccttgtctcaaaaaataaaaaaattagccaggcatggtgatgtgtcccagctacttgggaggctgaggagggaggatcacttgagcccaagaggtcaaggctgcagtgaggcatgattgcaacactgcactccagcctgggcgacagggcagaccctgccttaaaaagagagagagagggaaggaaggaggaaggaaggaaggaaggagggagggagggagggaaggaaggaaagaaggaaggaaggagggagggagggatagagggagggagggaagtaaggaaggaaggaaagaaggaaggaaggagggagggacggatggagggagggagggatggagggagggagggaaagaaggaaggaaagaaggaaggagggagggagggacggagggagggagggaaggaaggaaagaaggaaggaaggagggagggagggagggagggatagagggagggagggagggaaggaaggaaggaaagaaggaaggaaggaaggagggagggagggagggaaggaaggaaagaaggaaggagggagggagggatggagggagggagggaaggaaggaaggaaagaaggaaggagggagggagggacggagggagggagggaaggaaggaaggaaggagggagggagggatggagggagggaagaaaagaaggaaggaaggaaggaaagaaggtaggaatgaaggaaggaagggccttgttcttagaaaatatccaccaagatctttagggttaatggggcatgatgtctccaacttaatttcaaatgactggaaataaattaatatgcatacatgcacaattacatacatataattctgtgtatacataactgcataataatatatctagcatatatgccatataagtaactatctttctgcgtatatatagatatatacatacatatccacctgcaatttatacataaatacatagacacacataaatgtgtatacacacacacggtgaacgatggagtgagagaataataaaagaaaaaatagggcaaggcaagtgtaaacagttggcatatttgagtataaagagtatacgaagtgcctgcggctattcttgcaacttctccgtaagttcaaaagtatattgaaaacagccagttagaaacaggcagcctggaagagattttaacagtcttcatctccagattgggattaccaggggaacttttccttttaaaaacaaaatggagacatcattcatataccataaaattcaccctcataaagtgtaaaattcagtaattttttttttgagacagaggcttgccctgtttcccaggctggagtgcagtggcgcgatctcggctcactgtaacctccgcctcccgggttcacgccattctcctgcctcagcctcccgagtagctgggattacaggcacccgccaccacgcccggctatttttttgtatttttagtagagacggggtttcaccatgttggccaggatggtctcactctcttgacctcgtgatccacccgcctcggcctcccaaagtgctgggattacaggcgtgaaccgccgtgccccggccaaaatgtattgatttttcagtatccctttttctttaaatctttgtgagttttctgaaatattttttcagcaacaagccagtgttacttttgtaaacataaagttgtacgattttgatgatgaaaaacggaactctcaccccctttgtagacttgtggaaccggggctggctcagcacagtcttgcagccgtcttgatggggtgagatcggggaggatcaagagctcccaccttccactgccccaccctccagctttgcccgccccagcccaagctgtgtggcaagaccccttgttggtgcaggtgctgggggctggtggctgctggcattcccaccttctagagtgactttcacactccctgatgagtttcccattccgctcagcaggcccataaattcaaagcgagggccgcaaatggggaatctgggatggcgcgtctggcttggggggctgggagccagcgggcccagacaagctgctggtgacctcggtcccccaagagctcagctgaggctgaaagggaaggatggggagggaaggacactcacacactctggaaatgagggcaaatcccagccctgacatttgacagccaagggctcaaatgaaaaagaaggtagaatttacacacacgcacgcaagcatccctcaatgggaactcacagtgaatatcgtgtgtagatccagtagaatgtcaccttggccgggtgcagtggctcacgcctgtaatcccagcactttgggaggctgaggtgggcggattatttgaggtcaggagtttgaaaccagcctggccaaaatggtgaaaccctgtctctactaaaaatacaaaaattagccgggtgtggtgtcacgtgcctgtagtcccagctactcgggaggctgaggcaggagaatcgcttgagccggggaggcagaggttgcagtgagcagagattgtgccaccgcactccagcctgggtgacagagcgggactccatctcaaaaaaaaaaaaaaaaaaaaaaaaagaatgtcaccttgaaatcataatgacagtggagaatcctggcatccactaccacgcaacaccacatccggctaatttttggccccagacgtcacccgatgtcccccaggggctaggatcagccgcaggttaggacccctgggttggaggtttcaccacggagagttgcggcggcaagaagacaccaggaggaagtgacctgcacacaatcaccagatcgtccctgagcatctggctctagggtctctgcctggaccgaagcattcccaggtgcagacccaggggtctctcctgtccctccgacctcacctgcgtaccctgcgttgcttcctctgccggggaagctcacccacgttctcaggtcctgggcggaagggcagagggctccccgggcacaatgtcttctgatgagaatcacagctgctgagatgcaactgcaaggggctgggaaagttcctgggacccaaaggagctgtgagatctagcgcctgggatggcagaggctctggccggtgaggacaacagccggcgtcagctcgggggtcggtacgcaggcggccaccttgtaacggccacaaacgggcttcaaaggggaggcaggcctgggctgctgagtcacccgggcctcatgcagttcacaaaaagctgtaactcgaggcagcatcacaccgaccgtggaagcatggaagggagggggacgctgtctcagcctccaggagctacctggcaggctgaggcaggagaatcacttgaacctgggaggcagaggttgcggtgagccaagatcgtgccactgcactccagcctgggcgacacagcaagactctcatctcaagaaaagagagagaaagagagaaggaaggaaggaaggaaggaaggaaggaaagaaaagaaaagaaggagagagagagagaaggaaggaaggaaagaaaagaaaaagaaagaaagaacaggaacaagataagggtggccactctcactgtttctattcagtattgttattgcaaattcaagccagggcaactgggcatgaaaaggaaatgaaaagcatccagattggagcaagagaagaaaaaccatctctctatttgcaaacggcctgttgtggtgtaaaaggtccccgggtacaatttgtgcagcagaaatacggcacttcacaggctgcttagaaacctagcaagtcccttgagcacaaactattttcctaagcttggtgggggcgtgagagggtggccggggactggtgacaatgttgtttgtgcactgggagagtccggctgaattgcaactggcctttacatcctaatcagctccctgaggacaacccgaaagacatcagattaaaaagtcacaatgagataaaccagcacgacgcggctctctgcaaagcgacaggtagtaaacagaccttaacgcacgtcatgaggtttgtttttcttttaaaagtcaacagctggtgaatcgcacagggccgggcagggcggtcaaagggcccgttcccccggctgggaaaaaagcaggagcccagggcggcggcagctggacgcgggccccgtggaactttctcccgtcagtcaggggccgtatttcttagccatcctcctctgaccttcatttcaaaccgcctgctgacgcatctaaccttggcccgttccgtgggaactccagactcagggtgaccaaccccagctgggttacccagggttgtcctggttggagtggctccaagtcctcagacccagcaaacccaggcttgctgatcacaccgcagaccccaccaggtggtcatctttctggggaaactggcttcttttcctccccgactcccttgctttgtcttcgtggtggcacctctcttcccaggtgctcaggtgtgacatcagccgtcccttgctggccctggtgccagctgactcccaggtctcctttctcttctttaagatggagtctccctctgtgacccaggctggagtgtaatggcgcgatcttggctcaccacaacctcccccttccaggttcaagcgattctcctgcctcagcctcccaagtagctgggattacaggcatgagccaccacacctggctaattttgtatttttagtagagatggggtttctccaccttggtcaggctggtctcgaactcccaacctcaggtgatccgcctgcctcagcctcccaaagtgctgggattccaggcatgagccaccacgcccggccgtctctttcttctaagatggagtctccctccgtggcccaggctggagtgcagtggcgcgatatcagctcactgtaacctccgcctcctgggttcaagtgattctcctgcctcagcctcccaggtagctgggactacaggtgcacttttttttttttttttttttttttaaatagcagagatggtgttttgccatgttgaacaggctggtcttgaactcctgacctcaagtgatccgtccgccttggcctccctaagtgctgagatcacaggcatgagccaccatgcctggcctcccagatgtcatttcttgcagctctcggagtcttccacgtgtctctggatcttcctgtgtcattcccacctccgctgtttgactctggtcccctcctcccatgtcagatgatggcagcagtaaggaaatgatgccttgatttagctcttttaggccctgcgcgtagggggttgtactaagtccaggagcatttaaaacctcactgcatacgcactacaacgtggatgaactccgaaaaatcacactcagtgagagaagccagacaaaaggccacacagtgtgtgatcccattgacatgaaatgttcagaacaggccagtctcgctctgtcgcccaggctggagtacagtgacatgatctcagctcactgcaacctccacctcccgggttcaagcgattcttctacctcagcctcccgagtagcttgaattacagacatgcactgccgtactcagctaatttttgtatttttagtagagacagggtttcaccctgttggccaggctggtctcgaactcctgacctcaagtgatccacctgcctcggcctcccaaagtgctgggattagaggtgtgtgagtcactgtgcctggcctttatagcatataattttatctcaataaagctgttaggaaataaactataggtaacaacattatcaagaggttgggcctcttatccaggtggatttttcaaatgaatcagtttttaaaagtaccattaaaaaacaaaactataagaggtaaggcaaaaaatagaacaggtaaagaaaatgggtcagtcttccttttttctctatcgggcacataacaattttccatatcttatagataaaactgaggcttagaaatggtagaattgtgtgaattatatcttgataaagctgtcgtctatatctatgtctctatatctattcatccatccacccatccattcactcatctatccattcatccacccatctgttcatccatccatccatccatccatccatccacccacccatccacccacccaaccaaccatccatccatccgcccactcatccattcacccattcatccatccatccacccacccacccacccatccatccatctatccattcatccatccatccgtccacccacctatccattcacccattcattcatccatccacccatccattcatccatccatccatccacccattcatccatccatccatccatccatccacccacccatccacccacctaaccaaccaaccaaccatccatccatccacccaaccaaccatccacccatccgcccacccaaccaactatccatccatccactcatccatccacccacccatccattcacccatccatccatccacccatccatccatttatccatccattcatccatccatccaaccatccatttactcatccatccatccatccacatacatacatactagaaatggtagaattgcaactagaattcaatatttgcaaatcctggtgcaataaatattattcttactcattttaaaatgttaatatctactttatttttcaaagttgagcacgatataagtatgttgttccttggattcctgatgctctcagtaacctagcaactcagcacctcacagagaacaagaagaacctcttgcgcggtaggtttggcttgcaaacaagccgttccacgctggaaggctgtgtcaaccgatgatgtggaagaataatcatccctccttgctgtttcttatgagatttgtcaggcatactcctacttgccaatactatttgccaacatactactccgcctcctctctgtttcctctcttgtaagatggcaataatgcatgcaggatgatttccatccctttctttaaaccttttggtatttttaagattttctagtatgtcactgttttcgtaatttgaaaataaagggttttttttttttttttttttttaagggagagattataggggactgagtgtgtggccttgagtttgtctgtttccaaactccctattgaggctgttcaaccaaagaaccaaagttgggggaaagtctatcccaaggctccagcccaaaggaagctctcttctacaatgggtgtgttaggatggaggagagccacaaagccagtaaaaaggcacatagcaaactggaagaaaatagtaatatgtagcatatgtaacaaagtgttagtgcctgtcatatgtaaagagcacctacaaatcaataagaaaaactcaatagccaaatagaagatatacagaggtacttagtgcaaagatactaacaatcagaaaagaaaggaataggtgactgatctcactgatggccaaataaatgaatattataacaccaaagagacactaatttcacataactggctggcaaaacttttaaattcagttgataaccattatggcaaggctgtgggggaactggcattttcactcactgttgacaggagttcaagttgctataaactttgtggaaggttattcgtcaatgattaacagaattgtaaatgccactatcttctaaagctgcatttctgcttttaggaatttacctcctgagatatttagacaaggtcaaaagtgatgtataccatgatgtttctgctgcaacattatttggatgtaagaaaaactgtaaagatcagtagtgtgttcttcaagtcactctggcatatccatacacaagaacgcgctaactaaaaagaatgaagctcactgatcacactgacaaaaaatggcaaccaaaaacaactcttaacatttttcaaaaggctgaaaagtagagttgctacattaaaaaaaaattgctccttctatcacagcatttttatttctagcaatgtggcagaaaacatcactttaaatctctcctcctctaaaacccaagcaagactggatgaaagaaatgaacaaaggccaggtgcagtggctcatgcctgtaatcccagcactttgggagactgaggcaggaagatcgcttgagcccaggagttcatgaccagcctgggaaacatagcaagatcctatctctagaaaaaatttttaaaaagcatccaggtgtgctggtatgtgcccatggtcccagctactcaggacgttgaggcagaaggattgcttgagcccaggaggtcgaggctctagtgagctatgattgcatcgtttcactccagcctgggtgacagagcaacaaggagagggaaggaaggggaggggaggggagggggaggggaaggaaggaaggagagggagggagggaagagagaaagaaagaaagaaagagagagagagagagggagggagggagagagggagagaggcaggggagaggagaaggaaaaaaagaaagaagaaaacgaaggaaggaaggaaagaaggaaggaaggagagggagggaaggaaggaaggaaggacggaagaaagaaagaaagggagggagggagagagggacggagggaggggaaaggagaagggaaaaaaagaaagaagaaaaggaaggaaggaaagaaggaaggaaggaaggagagggagggaggaaaaaaaaagaaaagaaaatgcatactctttctaaccaacagctgaggtcacaaaaaagtaagaaaatccagcacagactaaaaacttcaaagaggacagggcaccgggtggtgagaagtggcctgtggccacccagattgaggggagaggcttctggtcttggtcaccaacggcctgatgttgttcttaatctctgcctctcttaaaaatgtatagtggaaaattccttttttaaaaaaaaaacttggaatgtttgtctttattttgtgctttatattttcaaagtgaaaagaaatagtattgagtcaatttttgttttttaaaatattcgttctatatatttacaagccttcaagctgctctaaagatttcaaaagtattaagagtaggactgggcgtggtggctcacacctgtaatcccagcactttgggaggctgaggtaggtggatcacctgaggtcagaagttcgagaccagcccgggcaacaaggcgaaacctcgtctctactaaaaatacaaaaattagccgggcatgggggcggctgcctgtagtcccagctactaggggtgctgaggcaggagaatcgcttgaacctgggacacggagcttgcagtgagccgagattgtgccactgcactcctgcctgggcaacagagtgagactccatctaaaaaaaaaaaaaaattgcaaatacttttcccggggtagcactttttttttttttttaaacaatccttggagttctgtggtccatgccatttccttctgtttcaatgttatatatgttttgattactattgtgatgttttaagttttctgaagcaagctgagaggcaggccgaaatatttgatgccaaaaaaaaaaaaaaactttcttacctcattcaccccaaaccttctcaaatctggattaaatactatactttaaaacaaacatgaggtgcttctgaaggggaggaaaatttatttctctgcttttctattatacaagttgtttacagaaactgcaaatcaaggccgggcacagtggctcacgcctgtaatcccagcgctttgggaggccaagacgggcggatcacctgagctcaggagttcgagaccagcctggccaacatggagaaaccccatctctactaaaaatacaaaacacttagctgggtgtggtggtgggcacctgtagtcccagctacttgggaggctgaggcaggagaatcgcttgaacctgggaggtagaggttgcagtgagccgagatatcacaccactgcactccagcctaggcgacagagtgagactccctcaagaaagaaagaaagaaggaaagaaagaaggagggaaggaaggaaggaaggaaggaaggaaggaaggaaggaaggaggaagaaagaaactgcaaatttaaaaaattacatatagtggaaaatttcaaacacagcctgaagcacgcaggccaggacgaggtctctctgagtgtcgtcacctcctgcaacgggaattaacattctgcccttcttctgttctcacttctctctccagctttgcacgggtatttcacacaaattcaagacatcatatgactttgcctgtagaaccttcagaatgttctctaatcactgaagctttctgatttcccaacacagaaccacccaatcaaattaacactgtcttattatcaacttgctccatgattatcaacaataatttcctgttaccaataaccagcctgtgacccattgtccatgattatctcaaaaatgtctttaatggcccggcgtggtggctcacgtctgtaatcccagccctttgggaggctgaggcgagctgattgcttcaggacaggagtttgagaccagcctgggcaacataccaagacctcatctctacaaaaaatacaaaaaaattagctgggcatggtggcacgtacctgtagtcccagctatttgaaaggatgaggtgggaggatcgcttgagcccaggtggtcaaggttgcagtgaaccatgatggcaccactgcactccagcctgggcaacagagcgagaccctgtctcaaaagaaattaaatttttttttttttgagacggagtctcactctgttgcccaggctggagtgcagtggcgtgatcttggctcactgcaacctccacctcccgggttcaagcgattctcctgcctcagcctcccaagtagctggcattacaggcgcccgccaccacgtccggctaatttttgtatttttagtagagacggggttttgccatgttggtcaggccggtcttgaactcctgacctcagttgattgatccacacacctcagcctcccaaagtgctgggattataggtgtgagccaccatgcccggctgaaaggaaattaaatttaagggccgagtgcagtggctcatgcctgtaatcccagcactttgggaggccgaggcgggtggattgcctgagctcaggagtttgagaccagcctgggcaacatagcaaaactccgtctctagtaaaaatacaaaaaattagccgggcgtggtggcgggtgcctgtaatcccagctactcgggaggctgaggcaggagaatggcgtgaacccgggaggcggagcttgcagcgagccaagatcgcaccactgcactccagcctgggcaacagagtgagactctgtctcaaaaaaaaaaaaaaagaaattaaatttaaaaaggtaaaaagcagctcaggaccgccaatgtacaatgcactccatatggctgtacgtatctatgtgagtgtgcatgtgtaggaaaagtctagggagtttcagtggttagacgacaatgaccaggacaactgtgtgagcagcacctgtgtggcactgagtcatctcaggctctccactcggctctgtccatcaacgaccgaatccagctctcacggcgactctacgctgcatgcttgttactctactacagaggaggaagcaacgcttacgaaaaccaaggaccagaagaactcacaatcaaaactagtgggcggccgggcgcggtggctcatatctgtaatctcagcactttgagaggccgaggcgggcggatcacctgaggtcaggagtttgggaccagcatggccaacatggtgaaaccccatctctactgaaaatacaaaaattagccgggtgcggtggtgcatgcctgtaatcccagctacttgggaggctgagacaggagaatcgcttgaacccaggaggtggaggttgcagtgagctgagatcgtgcctctgcactgcagcctgggcgacagagtgagagtcggtccctaaaattaaaataaaaaatagtaggcaggcccagcgcggggctcacacctgcaatcccagcactttgaaaggctgaggcaggaaaatcacttgagcccaggagtttcagaccagcctgggtaacatagtgagaccccgtctcaattaaaattaaaaaaaaattaagcaggtgtagtgatatccacctgtggtcccagctactcaggaggttgaggtgggaggatcgcttgagtccaagaggttgaggctgtagtgagccatgattatgccactgcactccagcctgggtgacaaagtgagaccctgtcccccccccaaaaaaaaaagtgggcaaatatcgacccagttgttctcctttcacgttctgcactgatgatcagttcccatccaccccacactgttaacagtggttaattctggggagtgagatttgtgatgaagatgtctccattctcactcctgcagtacgagacttctttacaaatatattctcaacagggtgaacatcaattcttggggagatgaaaacaaattttactttttttatggattaagcccagaaaacagaacataaacagatacacagtctatctatgatattgaaatttcacaggtataggctgggctcggtggctcacacctgcaatcccagcacttttggaggctgaggtgggaagatcacttgaggccaggagttcaagatcatcctggacaacatagcaagacccaatctctagaaagaataaaaatttaaaaattatccaggcatggtggtgtgcacctgttatcccagctttggtgactgaggcgggaggattgcttgagcctgggagttggaagctgctgcagggagctgagatggcgttactgcactccagcttgagtgacagagaaagaagatcctgtctctaagataaaaacaaacaaaaactccattatataataatgctacttggggccagtcacagtggctcacgcctgtaatcctaacactgtgggaggccgaggcaggcggatcacctaaggtcaggagtttgagaccagcctggccaacatggtgaaaccccgtgtctactaaaaatacaaaaattagctgggcgtggtggcgggcacctgtaatcttagctactcaggaggctgaggcaggagaatcgcttgaacccaggaggtggaggttgcagtgagccgagatcacgccactgcactccagcctgggtgacaagagcaaaactccttctcaaaaataataataataaggccgagtgtggtggctcacacctgtaatcccagcactttgggaggccgaggtgggtggatcacgaggtcagcagatcgagaccatcctggctaacacggtgaaaccccgtctctactaaaaatacaaaaaattagccaggcgtggtggcgggcgcctgtagtgccagctactcgggaggctgaggcaggagaatggcgtgaacccaggaggcagagcttgcagtgagccgagattgcgccactgcactccagcctgggcaacagagtgagactctgtttcaaaaaaaaaaaaaaaaaagaaattaaatttagaaaggtaaaaagcagctcaggactgccaatgtacaatgcgctccatattgctgtacgtatctatgtgagtgtgcatgtgtaggaaaagtctagggagtttcagtggttagacgacaatgaccaggacaactgtgtgagcagcacctgtgtggcactgagtcatctcaggctctccactcggctctgtccatcaacgaccgaatccagctctcacggcgactctacgctgcatgcttgttactctactacagaggaggaagcaacgcttacgaaaaccaaggaccaaaagaactcacaatcaaaactagtgggcggccgggcgcggtggctcatatctgttaatcccagcactttgggaggccaaggtgggcggatcacctgaggtcaggagttcgagaccagcctggccaacatggtgaaaccacatctctactgaaaatacagaattggccgggcgtggtggctcacgcctgtactcccagcactttgggaggccgaggcgggcggatcacgaggtcaggagatcgagaccatcctggctaacacggtgaaaccccatctctactaaaaatacaaaaaattagctgggtgtggtggcgggcgcctgtagtcccagctactcgggaggctgaggcaggagaatggtgtgaacccaggaggcagagcttgcagtgagctgagatcgcgccactgcactccagcctgagcgacagagcgagactccgtctcaaaaaaaatgaaaagtaataaaataataataataataataataataataataataataataataataatgctacttgggcatcttccgtcaaaagaatcagacatcgggtgcatttaaatctcttgccaccgttattctttctaaggagccactaggaaaaggatgtctcaaaagaaggtgatcacggaaaaagaaagcttatgaaacactgacttctgtaatcacgttttcagttgaaagaaatggaaactgatctaacttccagctcacctcaagctggaaagaagtctagtttctagaagcatctccaaaattggaaagtgaagtttctagcatacagttccaccgagggcccatgatgaagagggggagaggcgggcacgaggcgaagcgggtgccccgcgctcggctggaaaaagccaatgtcaccgggctgtgctatttgcttgtgggagggacgcctggggtgggggcgtgccgctggttgctccgccgcagacaccacgtggtgctttttgaactgatcagagccccagcctgcctgctttgctgtcccgggctgacctccgaaaacaccgcactttcccctcgctgacttggtagatgtctgtctgtctgcttgagtatctcgaagatctgaggtttccattccagcagaataaatactaggagggcccaccccttcctcctcccagccgaggctggatgaatccaaataaacccagctggtggggaagagcatttctaggacttcggcgggagaaagcaccgcccacccgggtgggtttccaggaggtggaggtgcggacctgggaggggggccctcgggcagccctgccatgcagccgcgtcactccgcctgcctgatgtcacaggagctgggggagtttgggtatttcatgaagctgttgagttattgtggctttggtttgtgacaccggcgttcaggcacggcctaaaggcaacatcaaagacggtgcatgaaaaccgggggttaggccgggcgcggtggctcacgcctgtaatcccagcactttgggagaccgaggcaggcggatcacctgcggtcaggagttcgagaccagcctgggcaatacggcgaaaccccgtctctactaaaaatacaaaaattagccgggggtggtggtgctggcctgtgatcccagctactcaggaggctgaggcaggagaatcgcttgagccctggaggtggaggttgcagagagctgagatggcgccaccgcactccagcctgggcaacagagcaagactccatctcaaaaaaaaaaaaaaattagattgtggtaatggttacacaactctggatattctaaaaaccactgaattgtacactttaaaaagtgaattctatggcatgtaaaaatctcaataaagctgtcatataaaataaatatatataaatatgatgccaaaatatatacataaatatggtaataaaaaattaaggcccttaaacagcttgtgtttatgtagattttagctatactcctgttacaagttaacataatcccattaaatatttttttaaaccatatattttatattaggaggatgacacgtttaagtgaaaagtaactatttttcaaaaaaaaaaaacattgaggggaaatagtggcattgttttacatttttgcaaatttctttcatgtctggcttaatagaagacagctggattcttgtataagcctctgagttcaatccactgtgatatcaaacgtcatgcaacctctgaaaactccaccatctgtgtgggagagactgggaggaaggagacccagagtatcttggcatttttttttttttttttttgtgagatggagtctcgctctgtcacccaggctggagtgcagtggcgcaatctcagctcacttcaacctccgcctcctgggttcaagtgattctcctgcctcagcctcccaagtagctgggattacaggcgccaccaccacacctggctaatttttttttttaatttttagtagagacagggtttcaccatgttggccaggctggtctcgaactcctgagctcaggtgatccacccaccttgacctctcaaagcgctgggattacaggtgtgagccacagtgcctggcttctatcttagcagttttgacctagtggtcccccaccaaaagggtctcagagaccaacccctgggtgtccctggaccacactttgagaactccaatacacaggtattctctctacttcacagaagagaaaatgcgatccaagatggtaataaacctgctcaagtcctcaaagctgaaaagtacggctgaaggagaataaaaaagagaaacataaagcagttgtggtggtgtgtgcctgtgctcccagctacttgggaggctgaagtggtaggatcgcttgagcccgggagtttgaggctgcagtgagctaggatcacgccactacactccagcctgggtgacaaggagagacctcccccccgccaccatctccaaaaacaaattattacttatgtaaaaaatagaactaaggaaggtttgcttgactccaaagctgtgttctttgcatccattctagttccatccagatggcccggggtacagctgggatgcctgttgtccctaaaaaccatggggcacaagtaggtaaaccctagagtaggtaactcctcaattcagctcaaccactatctgaccagcctccagttaccaggcagtgtgtttccccagccatgtggactcagtcctgccacggcgcggctcgtgcctattgcagatacatgtacatgcttgcaatatacgtgtctgtctcccctgctctacaatgagctccccaggaacaaggactgggcaattttttttggcttcctgtctccactgtttggcagcaggaaaagagaggtgcctgaagaaagggtaacagagcaatgcaatcccccgatgtcagatttttattgaggaaaagaaaggcagtgaaggccgggcatggtggctcacgtctgtaatcccaagcacgttgggaggccggggcaggaggatcccttgagcccaggagttcgagaccagcctgagcaacatggcgagaccctgtctttataaaaaaattagccgggcatggtggtgtgagcctgtagtcccagctactagggaggttgaagcgggaggctcacttaaggaggctgaggttgcagtgagttatgatttcatcactgcacttcagcctgggccacagagtaagaccctgtctcagaaagaagaaaagagaagacaggggaggggaggggaggagaggagaggggaggagagcagtggaatcccagatgatccttccagaatctgcaagcagcactgtggaggcaccctggggaagaaagtctgctaggatctggagaagcactagaagccgggcacagtggctcacgcctgtaatcccagcactctgggaggccgagatgggcaggtcacctgaggtcaggagttcgagaccagcctggccaacatggtgaaaccccgtctctactaaaaatgcaaaaattagccgggcgtggtggtgcacgcctgtaatctcagctacttgggaggctgagacaggaggattgcttgaacccgggaggcagaggttgcagtgagctgagatcgcgccactgcactccagcctgggcgacagagcgagactccgtctcaaaacaacaacagaaaaagcagcactgaggactgggctgcgggctgcgtcctctgcaggccctggctcccctgtacccaccccctcctgcacgcttttaagcagatccagcactcccttcagggcgctggggaggagctgccagcagacaggaatgcgctgtgcagaagcagcaggttctgccagctcctcccgagcctgcagggaaatgcaggcagatctgtggcctcgcacaggcggacagacgggcagcagggatctccaaccgggccccggagcacgaaccactacgcaatcgtcacagcatgtgctaccttccgtggtgttctgggaatctaaatcaatcccatacgctggacagcaagccagaaacggaagccaatctcgggctgggcagagggccacccggccctcccctcaccaccacccctcccttttccttcaatcagaattgccttttataggcaggttgatagttcacagctggaagggggctcactgcggctctgcaaggaaagatgcgctacccacccttttctctctttctctttctttttctctttttctttctttctttctttctttctttttgtttcttcctttcttcctttctttcttttctttctctttctttctttctctctctctttccttccttcctttcttttctttctccctttcctttccccttccttccttccctttctttctttctttttctcttttctgttctgttctgttcttttttttgatggagtttcgctcttgttgcccaggctggagcacaatagcacagtcttgcctcactgaaacctccgcctcccgggttcaagcgatcctcctgcctcagcctcccgagtagctgggattacaggtgcgcaccaccatgcctggctaatttttgtatttttagtagagacggggtttcaccgtgttagccagggtgatctcgatctcctgacctcgtgatccacccgcctcggcctcccaaagtgctaggattacaggcgtgagccgccgtgcccggcctaaagctgtgttctttctgttccacaggctgcagagagggagctgatgccagaatgagggggaacccccggagcttctcgcatcgggtgggaccggcatccggtgagaccgcggtggctctctggggctgaaaattccaagcagagtagcccgaggaatccagccatccccgagggttcagaaatgcaaatcagggctgtgtattcacagcctggactggagatcgaccaaaaactatgcagggctcacccttgcggggcggcggctaaatttaggaaaccaaccatctggagaatgcaggcatcagaagcccctgcagctaggaggatcatttcagttcatttttattcactgttcatagatctcccagtttttcctagcgtgttcaagctggaaaggatttcagagattgtgtcacctagatttattttacagaaggaggaactaagcgtttaagggagaagtgcctgttcttttattattattattattattttattttttgagacagagtctcgctctgtcacccaggctggagtgcagtggtgcaatctcggctcactgcaagctctgcctcctgggttcacgccattctcctgcctcagcctcctgagtagctgggactacaggcgcccgccaccacgccccgctaattttttgtatttttagtagagacggggtttcactgtgttagccaggatggtatcgatctcttgacctcgtgatccacccgcctcggccccccaaagtgctaggattacaggcgtgagccaccgtgccgggtctcgagaagtgcctgttttaacacactgaaaagtggtcttagccaggtgcagcataatatgcccgtctcccagcactttgggaggccgaggcaggaggatcgcttgaggccaggagtttgagaccagcctgggcaacatagcaagaccccatcactacaaaaaataaaaataaattagccggatgtggtggcgtgtgcttgtggtcccagctactctggaggctgaagcaggaggatggcttgaaccaggaagtcgaggctgcagtgagctaggactgcgccactgcactccagcctgggcaacggagcaagaccctgcttcaaaaaaaaaaaaaaatgaatgaaaggaaggaaggaaggaagcgagggagggagggagggagggagcgagggagggaaggaaggaaggaagcgagggacagagggaggaaaaagagaaagttttctgccctagacactccagcctgggcaacggagcaagaccctccttcaaaaaaaaaaaaaaaaagaatgaatggaaggaaggaaggaagggagggagtggggagggagggagggaaaagagaaagttttctgccctattatgtgattttcacaccaccccaagttcaagaacaaagtgtggtttgtttgaatgcttttcccagacagagatgcagggcagtggcgagaaggaaacaatccagtggcggcttcccctctcttagaagtattaggcccaagaaaccacctgaaatcctgggatgaactagattctgtcgttggagtccaagtccttttggctgtcagtatgagtggcttgaagccgctataacaagtcacacggatctggtggcttaaaacaatggaaatggattctctatggctctggaggtcagaaatctagatgtgggcaaggccgtgctccctctggaggctccaggggaggatccttcctgcctcctccagcttctggggcctccaggcatcctctggcttgagcccacatggctccagtctctgcctccatctccccatgcctttcctcatgtgtcaaatctcactgttgttttttttgtttgttttttgagacaaggtctctctctgttgcccaggttggagtgcaccagacaccatctcggctcactgcaacctccgcctcctgggttcaagtgattctcctgcctcagcctcctgagtagctgggactacaggcacctgccaccatgcccagctaatttttgtattattagtagagacggggtttcaccatgttggccaaacaggtctcaaacttgtggcctcaagtgatcctcctgcctcagcctcccaaagtgctgggattacaggtgtgagccaccacacctggccaaatctcacttttttttttttttttttttttttgaggcagagtcttgctttgttgcccaggctggagtgcagtggcttgatcttggcttactgcaacctctgcctcctcagctgaagtgattctcctgcctcagcctcccgagtagctgggattacaggcatgcgccaccacacccagctaatttttgtatttttagtagagacggggtttcaccatgttggccagcatggtctcgatctcctgacctcgtgatctgcccgccttggcctcccaaagtgctgggatgacaggtgtgagccaccgcagcctgccaaaatctcactcttataaggacatttgtaattgtttagggtccacctggagaacccaggataatctgccgtctgaagatccttcatgtgatcacttctgcgacctctttgtcctataagggaaaattcacaggttccagacatttaggagccaatatctttgggggcattactcacacgacatacaaagtctcttttcagggcaaacatagatgctcacaggaaatgcctccatgccccgcagtcgggcaagcttccaagcaagcaagccgcttttaagagtcaggaagaggctgggtggctcacgcccgtaatcccagcactgtgggaggccgaggtgggtggattgcttgagcccaggagtttgagaccagcctgggcaacatagtgagatcccatctctacaaaaaatacaaaaattagctgggcgtggtggtgtgcacctgtagtccttggggggctgaggtgggaggatcacttgagcccaggagttggaggctacagtgagccgagattgcaccactgcactccaacctgcgtgacaaagttagactctgtttctggccaggtgcagtggctcatgcctgtaatcccagcactttgggaaactgaggtgggcagatcacctgaggtcaggagttcgagaccagcctgaccaacatggagaaaccccatctctactaaaaatacaaaaattagctgggtgtggtggtgcacgcctgtaatcccagctattcaggaggctgaggcagcagaatcgcttgaacccgggaggtggaggttgcggtgagccaagattgtgccactgcactccagcctgggcaacaagagtgaaactctgtctcaaaaaaaaataattaattaattaattaattaattaatttaaaaaaaaagttagaccctgtctcaaaaataaaaagtcaggatgagagaaggcagccaaggcaaggaagaccaataacatgctcggatggtgcagtctctttggaacattccaaaactaaactgagaaggttcccattctcggtgatgacaagtttctggaactagatagatagtgctggtgtttgcacgcagtgttcatggaaataatgccatggagttgcaaacttttgaacagtaaacaagggccgggcaccgtggctcatgcctgtaatcccagcacctcaggaggccgaggcggggggatcatttgagcccaggattttgagaccagcctgggcaacacagcgagaccctgtctccacgaaaaatttaaaaattagctgggcatggtggtgtgtgtctgtagtcccagctactcaagaggctgaggtgggaggatcacttgagcccaggaggttgaggctgcagtgagctgtgatcgcaccactgcactccagcctgggcgacagagcaagaccctgtgtcaaaaaaaaaaaagaaggccaggtgtggtggctcacacctgtaatcccagcactttgggaggtcgaggcaggcagatcatctgaggtcgggagttcaagaccagcctggccaacatggagaaaccctaacatttttagtttctactaaaaattcaaaaaattagccgagcatgatggcaggcgcctgttatcccagctacttgggaggctgaggcaggagaattgcttgaacctgggaggcagaggttgcagtgagccgagatcgcaccattgcactccagcctgggcgacaagagtgaaactccatctcaaaaagaaaaaaaaaaagaaagactaaaatggtaaaaaaaaaaaaaaaaagaaagaaagaaaagaaaaaagaaaaagaaatacatattaggatggggcaagctaaactacattgttatgtattttaacaacacataaaacccacttggggccagtctgcaagtacctcccatgtaggctcagcctggcacttgaaccccgtgccctccgccccccgcccctcccagtggcgtctccgcttctcacttcagaggcagagctgtcatcgtgggcactgggaagtagcctgcagtgtcagcacagaccggcgctcaccaacgacacggcacggaggctttctagggagcagtccccccaggacagcaatacgttcaggcgacagcgacacagggcagcaacagcggttccctcctggcaggcagccagacgcacacacgcacgcagaccacaccatccagaaagttcacctgcgacctgagacgcagctctttgagggagatcagaagatcagatggtatttgagaaaaaaaaaaaaaaaaaggttaagccaagtcagtgggaaggtggaggaaaaaaaaaataaataaaggttaggctgaggtcgccgccctgccactcatgacacagagcgtggcacgtcggtttcacacctaaaagtcagaacgattcacaggtggcgaagcgtgggtggaggaaaagagcggggatgtctgaggagcagaaagaccgaaacgcaagagtaatacctgctgcggagaggttccgcccacgtgggatttgcccctgggaaaaaaaaaaaaagtccccgaagcccctgcaaggcaaggcctgcgggctggagggacgggctcttcacacacacgggaggacagagatcgtctctggaggtgggcgccccagcaggcacactgacggcctcggtgcagctcccctgcacccccaaatgacgcaggtcagtaatccagggacgggcagcaggctcacgtgtccccagatgcaggcacacctgtgcctctcgagtcatctgcagagtcacgagaccagcaacctggaaacctggaggagctcccctggctgccaccggacaccccagggcaaggggccgggtgcctcccgggcaaccccctctctctgcagcaggggatgcagatggcagagtctcaaaggccttccctgcatggggcagacacggaggacacactctcccggggtctgcactgaggctgtcagggggcctgctgcgttccccactccaggtaaccctgtctgctggcactgagggcctcatcagacccctgcaggcctgcaaccacagccaaaatcagtgtgccttctccaaagccaccttctgacccgctttttaaagaaactgaggtaaggtttgcataatgtaaaattaagcattttaaagtgaacaattcagtggcattcaacacattcacaacgttgtacaaacatcatgcctacctagttcttgtacattctctctctctctctctctctctttttttgttttgagacagggtctcactccatcttccaggctggagtgcagtggtgcgatcttggctcaccgcaacctctgcctctcaggttcaagcaatcctcctgccttagcctcccgagtagctgggattacaggcatgcaccaccacacctggctaatttttaatttttcgtagagatgggggtctcactatgttgccaaggctggtcttgaactcctagcctcatgatcctcccacctcagtgtcctgtggagctgggactacaggcacgtaccaccccacccagctaatttttgttttacactaaagtgttatttcatcttggtcgctgaggttttttagcgcccccttcaattttgtgcccagtgtgaatacattgcttgcctgaccctggtcctgccctgggatttgggagccgacaggtccgggtaacaactgcagtttagccgctcacttgctggaggacctcaggctctcttccgtgagccttattttggccattgctggaatcccgttgtgcaggacagctgggtggattgcagtgatgtttgcgcaccacgtcccgagtgccagagcagacagggtcccacctgttaccgtcttggacttccagcctccagaaccaagagagagaagaaatctctgttgctaaagccctcctccagtctgtggcttgaggttacagagccccagcaaaccatcacgctgggttaaaggaactggtccccagagctcacagctgcagactggccaccgtaggacaatccagtgggacctgggggtgcctctgggccattgggggaccctcggtgagccagtgaactcagtgcacttctggagctccctgaccacgagtgaggaaattgaacggtacaggaaaagcaggagagcgtgcaccttaaacggccaaggtccgtcactaccaccgagcacctgccaggctccccacccagtgctcccaaaagtagagggccccctccctcccctaaactctcagaggttagtatcaccgggtcaagatgatgacagcacggggaagcctctggcaagggccttgccccaggggacagctcaggtggcctcggataacatgacaaagaccttctttatttattattattattaattttttattttttttggagacagggtctcaccctgtcgcccagactggagtgcagtggtgcaatcatggctcactgcagcctcagcctcctggactcaagcaatactcctgcctcagcctcccgagcagcttggactataggtgtgcactgccacacctggcttttttttttttaatttttatttatttattattacttttttaagacagagtcttgctctgtcgcccaggctggagtgtagtggtgtgatcctgggtcattgcaacctctgcctcctgggttcaagcgattctcctgcctcagcctcctgagtagctgggattacaggcaactgccaccacgctcagctaatttttgtgttttcagtagagacggggtttcaccatgttggccaggctgatctcaaactcctgacctcaggtgatccacccgcctcgcaaagtggtgggattacaggcatgagctatcacgcccggccactaatttttttattttttagtagagacggggtcttgctgtcttgtccaggctggtctcaaactcctgggcttaagcgatcctcccgcctcagcctcccaaagtgctgggattgcaggcacaagagaccctcttttattgttgcaagatgctgacaggtttcagaagaggtttgaaccaaagcggcctcagggacccaggtggcccctgggatacgtttctcccaggccaggtttggtttcagtcggcctgagcgtgcagacacctgtctcctgggcactaaacttgacactttcagttcctatcaggcggtggggacgagggggcgggtgggagggggggaacgggctcacgtgccaggctcggggggggggaagcgtcctcaacattctcagaaaggaccacgcccggcaccggccttggatggcttccctctcgcaatctgctttctgggaagtgggcccctcgcaccgggtgcggcgcccagggttccccgccaccccgacccttactaagccgctcagcccagggatccagggccctggcgagacagcctgggagacgcagagtgggaaatgatgactgggagctggtatcgcgaatgtctacacgcagactgacttcaggggcgaggaattccgcctggcgagcgtctagactgcggtgtttctgggacgctgggagctggagccaggacaggtctcccgggagctggtctgtgctgccacctgctggtcatggcccgacaggcggcctcgctgtcaccactgagtgagctcgaggtgccccgtcccaggaccgtggcaggagggggtcccgtcctgcgtggggcttgaaggcaggtgggcaagacggtgcatagcccgaatctatttaatgatttatttgataataccatttaaaaatatctcttaggccgggtgcaatggctcacgcctgtaatcccagcacttggagaggccaaggtgggaggataacttgggctcagaaggtcgagaccagcctggccaagagagcaacaccaggtctctacaaaaaattaaaaattagccgggcatgctggcgggcgcctgtaatcccatctactcaggagaccgaggcaggagaatcgctcgaaccggggaggtggaggctgcactgagcgttgatcgcgccactgctctccagcctgggcgacagagggagattctgtctctaaaaaaataaaaagtaaaagtaaaagtaaataaaaataaaaatcttttttttttttgagatggagtctcgctctgtcaccaggctgaagtgcagtagtgtgatctcagctcactgcaacctccgcctcccgagtttaagcgattctcctgcttcagcctccccaagtagctggaactacaggcacccgccaccacgcccagctaattttagtatttttagtagagaccgggtttcaccatgttggccaggatggtctcgatctctcaacctcgtgatccgcctaccctggcctcccaaagtgctgggactacaggtgtgagccagcgcgcccggccaaatctttctttctttttaataattggattgactttggtctacggtctcccctggggccccatccttctctggggtggggccatcctgggcactgcagggtgctcagcagcatctctgacctccgcccactccatgccaggagcatcccagttgtgataaccacacgtccccaaacatcgcccagtgccccctggggggcagcatcacccacatttaaaaacagttccagggtagcagcctgcaaagaaggtgtgtctgggacctgggcatttcatatcggggtgacccagcctgggagaggggaggggcctcagtgagaagactgaagccaggaccccccccaggcaggacccaggctcccacggcacaaaagccccaggtccagggttcctggaaatgttttaaaatccagtcgacaaaagatgaataaaatacttgtgagtgtataatcatgaatccagcctggattctgtttgtctttatgccaagacaattgtaaaatacagcttagaatttttttttttttttgagaaattttttttttttttttgagagtcttgctgtgtcgcccaggcagcggtgcgatctcggctcgctgcaacttccacctcccagttcaagcaattctcctgcctgagcctcctgggtagctgggactacaggtacccaccaccacacccggctaattttgtatttttagtagagacgggttttcaccatgttggccaggatggtctcgaactcctgacctcaggtgatccgtccgcctcggcctcccaaagtgttgagattacagatgtgaacaacggtgcctggccaacgtcggacatttttagagcggaggaggtagcctaggagggcaaatgtgccccaggccctgagtgtcccaacatggccctgcagccaggtagaaccagccagggaaagggatggtgtttaagggacgtggaaaaggaattcagacaaagaatttctgatgcaagtttaacccggctggtggctgcagcctacttcctgctacaggctgcacagtctcttgctgaattagcacctacgttgaattaggtgagtttgcttgaactatacgttgaattaggtgttgaattaacacataggggggctttgggctctcagcccctcatctaaagtccattgtctcaagccactgcctcattggaagagcaggtgtctacactacctggagagggggagatcctgcattaattatttggggagaatgcaatctgtccccgctcctgctcacagtagatacaagaataaactcccgacggggcagatggcataaaccagggggacccccagctcctgggactcttcctcctctctccctccccactcagggtgtggatttcaatgtgtgcagcctcctgggacctcagtaggagagatggtcacggaatgcagagtctcttggggaatctgtggattcccctaacctgggcggggggtctcaatcaggggtgatcctgcccccaggggacactgggcaatgtctggggacatttgtggttgtcatgcctggaggtgctcccggcatggagtgggtggaggccaggacgccactcagcaccctgcagtgcccaggatggccagaccccagaggatctagccccagatgtccacagtacctagcaggagagatcctgatttaattaattggtgagggggaagatcaagggaccctggctatgccaagaaactcggactgcagcagtgtgtggatcctgaatgagaaaggtgcgaatcagacagaagctcgcagcctaaggccagcgaaggccacggccacagcgacatctaaaggccggcaagtgcaatgcagaatccacccagggaactcgggccccgcgcctacccccggggtaaagggggccagcctcgcacaggtgggtccgttgcaggcgtctgttgcgagaccacatcctcaccacccggtgaacggcactgggagcagactcaagaggctcgagaggtcccaggagggcgggaagagagttcccccagctacagcctgagcatggtcgccagaaagcaggtgcggcgactttccctagcaccctctccctgccctctgtgtacccgcaggggggccctgcacgtcgggtctcaggcacatgtgtggtgaaatgcacacaacaaaaaagctccctttccagacatccagtggcattcgtgcagccatcatctctagctagctctagaacattctcagccccccaaaaagacaccccatccctatcagctgtcacttcccatccccctccccagcccctggcacccacacatccccttcctgcctctctagactggcctgtcctggacatttcatagaaataggatgacacactgtgtggccttttggatctggcatctctcactgagtgtgacatcctcaaggggcatccaggctgcacgtggcctgggtcagagtctcgttcacggctgagtctcgttccagtgtgtggagggccacgctgtttatctatttacccacggacggacacttgggtcatttccaccttttagccattgtgaatcgtactgtatgaacatttgtggcaaggttctatttgaacacctgcttccaattcctctgggcagataactaggagcggaattgctgggtcatgtggcgactccgcgttcagccttttgaggaaccaccagactggtttccaaggcggctgccccatcttgcatcacacatcaattctcaatgccaaggcgttcctcagcttttaaacaaggcactgaggcaggaggcaggcagctgattgttgaaggtcaccccgtagccattggcagagccagaacttgcagctgtgatttgtgccgcggctcctgcccaagccctccttccctggcttcagtgctgggctgggcaaggtgtgtggaatagccccgctttctaggccactttcggggtactgggcggccactgtctggtctgaaggtgccatctgtgacactcttttttttttttttgagacggagtctcgctctgtcgcccaggctggagtgcagtggcgcgatctcggctcactgcaaactccacctcccaggttcccaccattcaggctcccccagacctccgcctccagggagccctccagaatgtccttcctcctgccttcaatgctcctccccatcctgcaggggtcggcaaggatgtcctctccttagagaccttcctggacaccacgtggcacagactctgtcctcttggtgccacctcatcctattttctttgtcttttccggttttttttttttttttttttttttttgagatagggtcttgctctgttgcccaggctggagtgcagtggtgcagtcacagctcactgcaacctcagcctcctgggctcaagtgatcctcctgcctcagcctccagagtagctggaactacaggcacccaccaccacgcctggctaatttttttgtatttttagtagacatggggtttcaccatgttagccaggatggtctcgatgtcctgacctcatgatctgcccgcctcggcctcccaaagtgctgggattacaggcatgagccaccacgcctggcccatctgtgagattctgaagagccactgctgagcaattaagctgccctctgcagtgggaaattttctttgcaaggaagcagcaaggcggaggaggcaggagggttccctaagattgtgcacccacggcagccagcaatgtgcctgacacagtgaagggcctcggcaaaggggcgcctcctgtccccttcaaatccttacgggccaccccaggatctggtgacctggaacagactcctgtatgggcctttttcccctggtgccagcagggaacagggcaggatggaaaaaacacccagtagccagtggcccactgatgtcaccaagctgcagggctgcccagcattgattaaacacagctggtgtgggccaggcatggcacctcacacctgtgatcccagtgctttgggaggctgaggcgagaggatcccttgagctcaggagttcaaaaccagcctgggcaaaatagtgagaccccatctctaatttattattattattttgagccggagtctcgctctgctgcccaggctggagtgcaatggcacgatctcgactcattgcaacctctgcctcccgtgttccagcgattctcctgcctcagcctcccgagtagctgggattacaggcgtgtgccaccgtgcccagctaatttttgtatttttagtagagatgaggttttgtcatgttagccaggctagagactccatctctattaaaaaacaaacaaagaaaggctgggtgtggtggctcatgcctataatcccagcactttgggaggccaaagcgagcggatcacctcaggtcaggagtttgagaccagcctgaccaacagggagaaaccccgtctctcctaaaaatacaaaattagccgggcatggtggcgggtgcctgtaatcccagctactcaggaggctgaggcagaattgcttgaacccgggaggcagaggttgcaggttgcagtgagccgagatcacgccatcgcactccagcctgagcaaaaccccatctcaaaaaaaaaaaccagacaaatatagctggtgggttcttgggcaaggctggtgaccagggccctaggggaggatgtttccaagagctgccaagagcagtggggcccgggttctgcccgcctcttcctctgactgtttcctcatctggggtcacgggataagtgcagctccgcctccctggtcatgcaggtgactgtgaatgaaagtgtcttggaatcagaaggttctggcatgaaagctttgcaccagccttccaccagtgtgctgcccagcacgtgactatcggaaaaactttagcttatttcagcctaattacattccgttaacccaaagtctctgacgttcagggctggatcattctctgggatggggccatcctggtgcactgcagggtgctgagtggcgtccctgacccccacccactccatgccaggagcatctccagtcgtgacaaccacagatgtccccagatatcacccagagtcccctggaggcaaacctgtcccacttaagaaccgctggcctggaccagaaactggatctttcagggaggcagagctcaccagccatccaggcactgagcccggcccagccctgcagctctgaccctgccttgggctgtgagctctgaggaccccatcaatctgatcaagaagccacactaggtcacctcagaccaaggacattctgccatgatgcttcagactgttcttctccccatcctcctctccacctccagccctcaaagacctggcctgggtcccctcccgtggctcccagacctccgcttccagggagccctccggaatgtccttcctcctgccttcaatgctcctccccatcctgcaggggttggcaaggatgtcccctccttagagaccttcctggacaccacgtggcacagactctctcctcttggtgccacctcatcctattttgtcttttcctttttattttttttttttttgagatagggtcttgctctgttgcccaggctggagtgcagtggtgcagtcacagctcaccgcaacctcagcctcctgggctcaagtgatcctcctacctcagcctccagagcagctggaactacaggtgtgcaccaccatgcccggctaattttttaaatgttttgtagagatacggtcctgctatgttgcccaggctggtctcaaactcctggcctcaagtgatcctcccacctcggcctcccaaagcgctgagattacaggcgtgactatttccttatcttctaagaccctctgtttggtttgccagtgtgtctgggcatgtgctgtctctgtgtgacacatgctccctgagaacaggacttgattccacctgtatcaggctgggcccccagcacctaggctgtccctggcacacagtgagtgtcgggtcaatatttgcgactgaccgacgggttggccttccatctactcttccactcaccagcttctccatcttgcccaaatccctgccaaccccagggcactgaggacacagattactcctcacccatgccccttgcaaagctctcagccacatttttctcttttctacctgtatgtgtgtggtgtgtgtgtgtgtgtgtgtgtgtgtgtgtgtatctcactctgttgcccaggctggagtgcagtggtgcaacctcagctcactgcaacctgcacctcccctgttcaagcgattctcctgcctcagcctcccaagtagctgggattacaggcacgtgccaccacacccacctaatttttgtattttcagtggagacggggtttcgccatgttgtccaggctggtctcgaactcctgacctcaaatgatccacccgcctcggcctcccaaagtgctgggattacagacgtgagccaccgtgcccagcctgttctattttttttttaataaacaattttatttggagtaattttagatttacaggaaagttgcaaagagagagtccccgcccacgcctcaccagcttcctcttcaggggccaccctgtgtaaccacagggcattgctcacagctggggaacgctggcaccttcctagtaaccaaatgccacagcgattcagcttccctcagttttcccctcacgacctttcctgccccattgtgaccccatccaggagcccatgtggcatctgaccgtcccatctccgtgggttcctctgggctctcagtttcttggtctttctttggtatttccatgaacttttttgtttgtctctttaagaaaacggttactatccatgaaaaacaaacaaacaaaaaatgtcattctggctaccctgagagcttataattgctattttaaaatgaatgaatacctatttgattgacattttctcagttttgatttcaaattcaacaaatatccgtaagtagaaggcatataaacaaaagctccttggaataatcgtcaggaccagagagtttgagaacctttgtcctaagccaggggttagctaactacggcccctggaccacatctagctgactgtgtgtttttgtaaataaagttttattggcacacggccacacccacttgttgacatattgcttgtggtggctttcccgctacaatggcaggcagagactgtccagcctgcaaaggctaaaacatttgccatctggatctctgcagaaaagtttgctaccccaggcctcgcacatagtaagttcatagcaagtatttgtttatagtaaggctgagccctaatcagggtgaagggcaaggtcagacatcggaggaccactgaaatgtccattctgtcccacctggtacagcaaacgccaccatggagcaggactcagccatgaaaaggaacaaggctctgatgccggccacagtgtggatggaccttgaggacatcacactctatgaaaggagccagagacagagggccacgcagtgtgtgatcccatttctacgaaatgtccaggacaggcccatccatggggacagggaggggatgcgtgtgtggcagggctgccggggggagatggggagtgactgctcatgggggacagggcttcttttgggggtgataggatgttccggaattagataaaggagatggttgcacaactctgtgaatgtaaaaaccgctgagctgcacatttttaaagggtgagttttacgctgtgtcagttatatctcaataaagctaatcctagcattttgggaggacgaggggggggcgcggatcacctgaggtcgggagttcaagaccagcctgaccaacataaagaaaccccgtctctactaaaaatacaaaattagccaggcatggtggtgcgcgcctgtattcgcagctacttgggaggctgaggcaggagaattgcttgaacccgggaggtagaggttgcaggttgcagtgagccgagatcgcgccatagcactccagcctgggcaacaagagcaaaactctgtctcaaaaacagaaaagaaaagaggagaggggaggggaggggaggggaggggaggggaggggagaggagaggaccctgtagaatgaaagaaaggcagatccccctgcaccctggctacaggccgtcgtcccgacccctctctctgcaggcaggtcactgcccccctcacaaacctctgtcctgatcccccaacccacacaccagagctgggcccatgcaccgggaaacctgccaccccaggggccactccagtctcagaccaacaggatattaaaaaaggcgaaacctcagaaccgtttcctatcgaaaccaattagaaagctcttgggtatgagtccaatgttttcaagcaactaaaggcaaaagagaagattttcaacgaaacatcccagctgggggtgagcttcttagggtcctgtcatcggccaccctagagggacctaggggtgagcttatgccgtcagcacccccagccaacgtgggtcggccagttagctgggcgtggtgttgtgcgcctgtaatcccagctacttgggaggttgaggcaggagaattgcttgaacccgggaagtggaggttgcagtgagccgaaatcgtgccattgcactctggctccgggcaacagagcaagacagctctgtgcagagaacagactcctgcggtggaaatgctggctgcctttgaggctgggttctgtgaccttgggtttcccagcctgagcttccagtttcatttataaaaggggtgacgtggccgccttcctgcaggcgctctgaaggtggcagattacacagaggtggtacgactcatacaggtttctgcaaacgggggccccatcaacagtcacctttccttagcacagcgccttcctcctggggtgacctcgccccttcctgcacaccccaggagcttcctgagacctgagtaaagctcacttcccttgcaaggggtttagtgacgtcccttcaaaattcttgtccacggggaacctcggaaaatgactgttacggactaattgcatttgcttaaaacttatgttgaagctggatgtggtggtccacacctgtggtcccagctactcgggaagctgaggcgggaggattgcttgagccctaggatttcagggctgcagtgagctatgatgctgccactgcactccagcctgtgcaacacagcagcaagactccagacacaaaaaattaattaaagaaaaatggctgggcacagtggctcactcctgtaatcccagcactttgggaggccgaggtgggcagatcacctgagataaggagttcgagaccagcctgaccaacatggacaaacctcatctctactaaaaacacaaagttagccgggcgtgttggtgcgcgcctgtaatcccagctactcgggaggctgaggcaggagaattgcttgaacctgggaggcagaggttgcagtgagccaagatggcaccactgcactccagcctgggtgacagagcaagacctcatctaaaacaaacaaacaaacaaacaaacaaaaacaaagaaggagacacagagagacagcagaaaacagaagcagagactggagcaattcgacggtaagcacaagccaggtttgccagagcccccagaagccagaggacgcggaaggatcctctcctgtagcgcccaggggagcacagctctgcagacagcttggtttagtacttctgccctccagaaccgtgagaggacacacgtctgcggattgatacttccgggtctgtggtcacctgttatggcagccacaagaggctcgtctgccccttttctctccccttccttcatgctgatcaccacggaggagtgagttcgattccctctgcctgcccaaaaccctcatcaactttttttttttttctctctcttttgagacggagtcttgctctgtcacccaggctggagtgcagtggcgagatctcggctcactgcaagctctgcctcccgggttcacgccattctcctgcctcagcctcctgagtagctgggactacaggcgcccgccaccacacccggctaattttttgtattttcagtagagacggggtttcaccatgttagccaggatggtctcgatctcctgaccttgtgatccgcctgtgtcggcctcccaaagtgctgggattacaggcatgagccaccgcgcccggctcctggtggtttttaagcttgcaaagggtgcgggataagccctgcagaagtcaatggtcagtaatgagggctggggattcagcccatctccagggaaagcccccgaaactggcaacaccagctgcttccgggaaggggaacccaatgcgagcaacgcggcagagagggggcttccgggaaggggaacccaacgcgagcaacgcggcagagaggggggcttccgggaaggggaacccaacgcgagcaacgcggcagagaggggggcttccgggaaggggaacccaacgcgagcaacgcggcagatagggggcttccgggaaggggaacccaatgcgagcaacgcggcagagagggaggcttccgggatggggaacccaatgcgagcaacgcggcagagagggaggcttccgggatggggaacccaatgcgagcaacgcggcagagagggggcttccgggaaagggagctcaatgcgagagcaacgtggcagagaggagggctttgttttcactttcaccgtgtatcatttataccactagagctctgacaccccgggcacggccactgatagaaaacattggtccttcttcctgggggtgtgtggccaagtgagggtgggtgagggagaagccactttccggctaaggtcctcaacacccaggctcagtctgagctcttctgtgtcccaggaggcaaaaaggtgaccacaggttgggctgtagtatcaaacccagaacaaacggggtgttccaagcctgggcaacatagccagaccccatctctacaaaaaaataattagccaggcgtggtggtgcacctgtagtcccagctactttggaggctgagatgggaggatcgcttgagcatgggcatttgaggctgcagtgagctgtgatcgtgccactgcactccagcctgggcaacagagcaagaccaggtctcaagaaaacaaataaacaaggtgttccttacccaaaggaattgcaaggaggggctcggacagatacttgtactgttcactcatgttcacagcacccaaaaggtggaagcaatcaatccaagcgtccatcaacagatggacagataaacagcatggtgcatctgtatgatggaatattactcagccatgaaaaggaagggaatcccaacacaggctgcaacacggatgcaccttgaggacgtcacgctcagtgagagaacccagacacaaaaaaccaaattggccaggtgtggtggctcacgcctttaatcccagcactttgggaggccaaggcaggtggatcacttgaggtcaggagttggagaccagcctgggcaatgtggtgaaaccccatctctactaaaaatacaaaaattagccgggcatagtggcaggtgcctgtaattccagctactcaggaggctgaagcaggagaattgcttgaatctgggaggcggaggttgcagtgagccgaggtcgcaccgctgcactccagcctgggccacagagcgagactgcatctaaaagaaaaggacaaatcttgtgtgactgcacgcctaggaggtccctagagccgtcagattcacagagacagtccatctgttgatggacgcttgagttgcttccaccttttggctgctgtgaacatgagcgaacagtacaagggaagcaggatggggggtgccaagggctgggaaggggacggggagcaagtgtttcacggggacagagattcagtctgggaagatggaaagttctggagatgacggtggtgatgggtgcagcaccatgcaaatgtgcttaatgccactgaactgagcccttagaaatggctaagatggtaaatactatgtttcatatattttaccacaattaaaaaaagaaagaaagggccgggcgcggtggctcacgcctgtaatcccagcactttgggaggccgaggtggaaggatcacgaggtcaggagatcgagaccatcctggctaacatggtgaaaccccgtctccaataaaaatacaaaaaaaattagccgggcgtggtggtgggcgcctgtagtcccagctactccggaggctgaggcaggagaatggcgagaacccgggaggcggagcttgcagtgagccgagattgtgccacttaactccagcctgggagacagcgagactccgtctcaaaaaaaaaaaaaaaaaagaaaaagaaaaaaagaaaagaaagaaagaaaggtgctccagtggctctcaggcagagctccacctctgtctggttgccggtggtgccacagcacagcaggcctctcgtctccggagcagtgactgtgacctgttgccagccctggcggctattcctagcagctcctgacctgcaggaggctgagcccagcagtgccttctgggaaggagggaaggagggaggctttctggtaattacccccaggcagagggcaggcgggcacaggggcccgagcccctccagcccatcccacaggctccagggtgtttactgagcttgcagaattccacgctgtgggctgggccactcctgccctgagacaggaagacaaggtcagctcagggcacagaagccatctcctggctgtcacctttccttgtgggtgcagagccggaccccaggcaggggtggacgcctgtggtttacctccctgggggctcgggccctgtgccgagggtgcatgtgttgtcccctggggcctctagacctcttcctttcttttgagacaagatcttgctctgtcgccaggctggagtgcagtggtgcgatctcagctcactgcaacctccgcctcccgggttcaagcaatcctcctgcctcagcctcccgaatagctgggaatacaggtgcacaccactgcacccggctaatttttaaaaatttttttgtagacaagggggtctcactcttttactgagcctggtcctgaatcctggcctcaagcaattctctcacttcagcaccccaaagcactgggattataggtgtgagccactgtgcccagccagggtttttatttttattttttgcagaaatagaggggggtctctgttgcccaggctggtctcaaactcccggcctcaagcgatcttcccatgtcggcctctgaaagtgctgggattacaggcgtgagccactgctcccagattagccagacttctctcttctcctcggtcacggggatcaggaagcagagaaccaaggttctgccaccaacttgtagaagggccatgggtcacccatgcccctcccagtgtttccatggttgccagggaagccagtgaagggcagagtctttggggaggaggaagctgggtcagagaggagatgagggtgtgagagggtgagcaggtagcgccctcaccgtgctgggcacaagacaaggacttcagagctgattattttggttttggggttttttgtttgtttttgtttttgttttgtttttgaggcggagtctcactctgtcgcccaggctggactgctcactgatgctcaccgcaactccgcctcccgggttcaagcgattctcctgcctcagcctcccaagtagctaggattacaggcgcccaccaccacgcctggctaatttttgtatttttagtagagatggggtttcactatgttggccaggctggtctcgaactcctgacctcaggtgatccacccgcctcggcctcccaaagtgctgggatgacaggcgtgagccatggcgcccggcctgattatttcatttactccctgcagcaaccctggactgcaggggtggtgatcaccccccattttaccaaacagaagcagagagtgaccgcgggtgcccacctgaccccgtgtctccagcgggaacgtgaagctgatgctgctcccgccccaggcctgaagccggccccctgccccaaaccagcctgaccagcggcaccgtggaaacccaccgggatctctgccacccacaggaggctggggcatctctcaccccctctgtgcctcagtttcctaatctgtcacacagggaggctggacccaaaccaattgattgttgtcatgggtggagccggaacccgctatggctccctcctgccctcgggataaaatgcagcctctgccgtgcggcctcctcactccctccctctcaccttttcaaggtcctggaaccatctctgcacctgtatcccccaccccacctgtcaccttcagggcactagcaacactcaactcatgtcacttcctccaggaagccctccctgaattcccgaacaaagctcctggtgtgggcacctgctttcactcttgggcggtgttgtcttcatcggttcactcaatcagggtctcaactggggtaattctgtcccctcaggggacactgggcggtgtcgggggacatctgtaattgtcatgacggagggaagtgggaccttccctgactaatattccctcacatcggtccatgctcctggcatggagtgggtggaggccagggatgctgctcagcaccctgcagtgcccaggacggcctcaccccagagaacagtccagtgtcagtgtccacagtgcccagggggagagacctgctttaattatttgggaataaactgagtgtcctccctactcacaccagacactggaataaactccagatggagcagacggcataaacccgggagccccagctcctgggactcatctcctctctctcttcccactcaggtgtggatttcaatgtgtgcagcctcctgggacctccgcagggcagaggatcatgggatgcagaatctcttggggtctgtggaatcttctatcccagagggtctcaaccaaggtgtttctgtcccaggggacgctgggtgatgtctggggatatttgtggttgtcatgactgggggtgctcctggcatggagttggtggaggccagggacactgtcagcaccctgcagtgcccaggatgacccaccccagagaacgatccacctcacatgttaaatggcggtaagggggtgaacccaccccctgcatggctccaggggcacccagagtggggccccagccctgtggccgcctctcctcccacttcctccgggcgcctgtcctctgcacctgcatcctctggccctggctcccttcagagctggtcacagctggcagcccgcgtgctgtaaacacccacccaggcgtgccagccagacctggctttctgtcactcccggctgattctgaattcccagtctcacatgggccagagggtgactggctcgagacttgcctctcattacgagcaaagctctgattcagccggaatattagtcagggtacagcatgtcacattccaggaggctgatcagctccgacctcaacaccggcagctgactcagcccggggagttgcatgtgctgactactccttctgagcctcacagttatgttctcgagatttcactcagtgtcctatggtgtcactggtcctggtcgcagacacagactcacctgtgtgcaggaggtcaggtgaggatcggtcccagcaccttcattctttgtttctttcactcactcagtaaacatctggtgaagacttggaccagatccctgatcttaatgaaggaggtgacggtccggcccaggtgacaggcacagttaatgtgatgatcacaacacagttgccatgtgaccctgggcacgtcagcccctctcagctactgttttctcctatgtgaagtggagatcattatctcaatctcaacatggcaaacaacacggcaagtgtatgagtcagctactgctgagtaacaacagcggcaacaaagacaccatttgccatctcacaacttctgtgtgtcaagagtctggcttaactgggtcccccgctcagagtcttataagcctaaaatcaaggtatgggctgggccgagttgtcatctggaatttggggtcctcttctgagctagtttggttatcggcagaattcatttccttgcagctctaggaatgaggtccctgtttacctactggctgttggatgtgagtgctctgagcccctagaggctactctcaggtgtctgccacatggaccctccacaggcagctcacgacatagctgtttgctttctttaaggcaagaaaccccttccctttctctctttctttcaactgtggtgtgtgtgtgtgtgtgtatatatatatataacataagacggatcatcttaaccacgtttatgtgtacggttcagtgatgttaagtatactcacactgctgtgcaatggctctccagaaccttccatcttgtaaaactgagacactgtatccactgaacaacagctcccctcttccctcccccagcccctagcacccaccattctcccttctgtctctctgaatttgacacctcgggatgtgcttctggtctcttttatgggctcacctgatgaggtcaggcccacccaggatgtctcctttttgatgagctcaggtcaactgactaggaatcttcgtcgcatctgcaaaatccctttaccgaacacacgacctaactgcattaacctaaccactggagtgacaccccatcgtattcgcaggtccagcccatcctcaagtgcaggggattagataagatgtgggcaccaggcggtgggggtcttgggcgccatcttggaattctgcctaggactgtagctgtaaaagacatggtggccattgctgctgtaggtgccattagtaggaaacacacacaaagtggcccccaaggagcacgtactatgcatcaggctctgtgcaaggcacagagaaaacagcaaagaactttggggaaagttgaagacttgaggtgaacaactggatatcttagtaggtctctctgaaggttgagcaaatggataggggatattgggagatgggttatgtcccttggaaagaactccaaatgtccctttcaataactttccactctaccagtcatctcctccttccagaaattctcaggaggcagcgcttggtggctcttctgcagatgccaggatggtgacggtgacagcaggccacgctcttgtgtttagaataggaggtccccaaggacacagagtcacagacgggtcaggtaagttgcctgggcgcccacacgaataggaggtgcttctggatttgaaacaagtcttctagtgctaggagccccagaacacacctagtgccaccccctccccacgacaaagcccaccagaagggctggctgcctaaagaggtagtggacaagacctcacagactcacagactagtgggagaagacagaagagcgtagccctgaacgcagtgtgggggcacacggtgattggaacctggcacccacatcaacggtcaaagtctagatggttttgtttggttgtactcccgcctccctctgaccccatgcccacgagtaagaggagctccgtccacatttatggacacttaatgttcctgcacacccataaataaggtgaagccgagtctgcatgtgtgcgaaagggcacagagctttgcacatacatggtgccagggtccatttcctggttttgtactatggttacgtaagatgtcaccactgggggaaactgtgaagatacatgtgatgttttttgctctgtgtgatttttgcaacttcctctgaatctgtaatgatttcaaaataaaggttgttttttttttttaataagtggagacacatttaggtgtaactgggacacagcctgccacctactttccaaatgcctcctttctcccaataacccccaccctctccccaaagacctggcagtactcctgcaagaggaagggatggacgccagaaaaagggagtgaaggtcctgctgattcggtcctggctgaggccgaacgcaggcccccccttccctttgccaccaagaggagtctaagatctccctggagaacatatcttgtagaaccccctccccttgagtgtgggcagggcccgtggacatgatgagatatcactcccctgattaggttgcttttcaggaaagaagggattttgaagaggtaaataaggtcctaaatcagttgaccttgagttcactgaaagggcgattatcctaggtgggcctggtctaatcaggtgaccctttaaaagggattgggcctttcctgaaatgagagcctggaagcatgaggggcctatggagaaggccaagtggcctgagagtggcctcaaagagctgagagttgccccctcctgacagctaacaacgcaacagaaacagtctatcaaccacaaagaactgaattctgaatgagcctggaatgagcttggaaggggatccgtcaccacacaaaccttcggatgagaatgcagccctggctcacatctccgaggtcagaagtttggacatagtgtggctgggtcctctgtgcagggtcttacccagccacactacatccaaacttctgacctatggaaccatgagataataaatgggtgtcactctaagctactgcattcatggtagttgttacgcagccatagctagctaatacactctttatgtgctgcagactagagcattctgggattttatggtcagctttcaaacttattcatacacaagggtttggacatcatgtccctccacaatcagccaagcaactcagcagtttcctcctgagtatgtctgagtatatcatcaaaaaggtctaatgactatgacattatctgattgtctcaacagcactgtgtggggctgaggaggcatagcaggcatgaagaccagaggaagaatggtgcatttagtattagacagcttgacatgcattaaccccttgagaggcaggcactgcctattctcccccctttcacagacgagggcattgaggttcagaaaagcacagagatggcccagggtcacagagccagtaggtggcagagttgggagcccaagccctaaactgctggttatgtcacctcatgaagccacttaacctcgctaggtctcagcatccttatctgtccagtgacgatcattctttcctcacgagtggttatgagatgaaatcagataactcaaggcctctaggctgagggtcagcaaaccttttctgcaaaaggccactgagctctgtccttgtagtatgaaagcagtcactgatgacaggtaaatgaatgtctgtggccgtgtgccaataaaactttattcataaaaacaggaagtggaacagagaacttggcccagggacctgcagtatgtctgtggctgtgtgccaataaaactttatttatacaaacagggagtggaggggggaacttggcccagggagctgcagtttgtctgtggctgtgtgccaataaaacttcatttataaaaacaggaagtggagggccagactgggcctggggtgggggcacagcatgtctgtggctgtatgccaataaaactttatttataaaaacaggaactagatgggggacttggcctgggggccacagttttcgaccccggctttagcagttttttccttcttttgctaacttctaaaatgaagccgactgaccctagaagtgccatttctgaaagaggaagagagaaaaggggtgaaaggacgttgaaccagccaaggcagactacagcattttcagggcgtctccccaagatctccaataaggacaactagcatcgactaggctaatcccgtgacggcctgttctgcggggacatcatcaccctggtgctgccctctcccccattctctagagaaaggagccccaaaagaacagataaactctgcctcctagaaaggtaagactcctggcctggcgctgtgtgggatcatgcctgtaatcccagcactttgggaggcagaggcaggtggatcacttgaggtcaggagttcgagaccagcctgaccaacatggtgaaacccgtctctactaaaaatacaaaaattagccaggcgtggtgtcaggcacctgtaatcccagctacttgggaggctgaggcaggagaattgcttgaacccgggaggtggaggttgcagtgagccgagattatgctattgcattctagcctgggagacaagagtgaaactccatctcaaaaaaaaaaaaaacaaaaaaacccaacctgctataaacaaaactcacacacacacacacacacacacacacacacacacacgcacacagaaaacagactgggaattgtaaaaacagctgacgaacagagactttctactctacagggaagtctctcaccgtcagcactgtggacatcgggactggatccatctctggggtgaggctgccctggcactgcagggtgctgagcagagtccctggcctccacccactccctgccaggagcaccccttagttacactgagctatgatcgcaccactgcactcgcacctgggcaacagagtgagactctgactctaaaataataataataacaagaatataagaataataattcagatccatgtccgataaaaataataaataagtaaagctgaggctctaacatgaagtcattacgaggctcatccagccacagtgggctctgcactggggcacccgcctgggcctctgcctggcccatgtctgctcaggagccctcagccccttgaaccctgctggtgggacagggggcccctctaccaggcccctaacttctcaacagaccccaccttgggcctccccaggctgcaccttaaccatctatgacacgcatccccaggcggcaccgggagtgtctgcgcagagatccgagggtgttagcctggcaggggccctgcaggtgggtgctggttcactaaaacgatgaagcggatgggaggaaaattagcatccaacgggcctcatcattgctgtcctgggcaatggactctgacccctgctgtagagggtcagagagggtcaaggtcaagccacagattggcagagccatcctctctggcctccactcggctcccccatgtcccctgcccccagcatctcatcatatgcgactgtcaccgccgtgtgtattttgagtcaaaggcggccaaggctcgatgaatctgccgatgaccaagttggtgcctcatccctcgttctgtgggaggctgactgttcaagcggttgcttagcaacaggcgcgcgcgcgcgcgcgcacacacacacacacacacacacacacacacacacacgagaggtggctgtggtctgcacactgggctggggtactcagatccccgggctcggtggtcgtggatgtgagcctctctgggtatggagcctcaatcagtagagtcaggtggtcgcaataacagctctgaaacggggattcattgagaggacatcggtgggcttgaaaacgggtgtctgtttaccggggcttgagtgggagctgtagtaattctgtccagaagaggacagaagcctgctctcaactcacccgggaggcaggttcttctgcaccgggccttctccccccggcactgtgggcatttggggctgaatcattcttggttgtggggctgccccgggcactgcagggtgctgagtggcacccctgacctccaccccatggcatccaccaatcgaggcagccacaaatgtctcctgggtgcaaaattgccccgagttgagaccccctgggataggggattccacggacccccaagagactccgcgtcccatgatcctctgccctgctgaggtccccggaggctgcacacattgaaatccacaccctgagtgaggagggagagaggaggtgagtcccaggagctgggggtcctcctggtttacaccgtctgccccactgggcgtttatggtgcctatcatgagcaggaaaataactcgaatttttttccccaaaataatgaacccagagtttctccccctcagcactgtggacatttgaggcccgattgttctctggggtggggccgtcctgggcactgcggggtgctgagcagtatccctggcctccacccactccatgccaggagctcccccaagtcgcgaaaaccacagatgtcccagaaattgctcagtgtccccggggttgggggtggggggcggcatcacccagatgacccctgctatagagggtcaaggtcatgtccaagctctcctaccgccgggaagcactgccttgtcctgggctacagatgtggaggctgctgggtacagggagaggtttctgagtcctggagactgtggcagagcccctgatttcggcacagcgccccgtaattacttgcgggctgcacacacgttttctctcggggagggtggtagcaatgagctgtgaccttccgggagcagagcgttttcaggctctggctgtatatcttggcaattctttcaggggaacaacttgtccgcgaaaagaactgataataacgtgaatttcaacacgaccaggacatgctgaaatctggtgaccgaccagggggaaataaacccgctctgactggccgcggggactggagtttgcttaccacacaagagcccttctcaggataagaggctccagtaaagctctcagcagaaatgttaccaaaaaaaaaaaaccctcgccgggagaacaaggagctaccagaaaaacacactcggtgatctggaggtcgcaaagttcttccgcactcagtgaggcaagaagcaaaaaggctgaagaaatgcttatcctggaagaggggttctcacccgggttctgtggacatcggagccggattgttctctggggtggggtcgtcctgggcactgcaggctgctgagcagcgtcccgggcctccacccactccatgccaggggcaccccccagtcgtgtaaccacaaatatccccagacattgccccagatgagtgaggacagaggtgcaggtgggtgcaggtgggcacaggtgggtgcaggtgccccgtgaacccatctccatctgcaccctctgcatctccaaccccacccccagccccagtgtctcctaaggggtagaaagtcttcagtgctgaatgtgagagaccctgccttaatttgagggaaaaaaaagtaatcaagtctgtcccctgctcacatcagacaccacgacaaactcccaatggagcagacggtgtaagacagggggaccccagctcctgggatttgcctcttctctccctcctcactcggagtgtggatttcagtgtgtgcagcctcctggaacctcagaggtccatatgatcatgggacacacctgagacccaggaggtctcaacttggggtgattttttttttttttgagacggagtctcgctgtattgcccaggctgtagtgcaatggtgcaatctcggctcactgcaacctctgcctcccaggttcaattgattctcctgcctcagcctacggagtagctgggattgcaggcgcccgccaccacacccagctaatttttgtatttttagtacagaggagttttcaccatgttggccaggatggtctcgaactcctgacctcaagtgatccgcccacctcagcctcccaaagtgctgggattacaggtgtgagccaccgtgcctggccaacttggggtgattctgtcccctaagggacactgagtgatatttggggacatttgtggttgtcacaactggcgggtgcacctggcatggagtgggtggaggcccgggacgctgctcagcagcctgcagtgcccaggacagccccaccccagagaaaaatgtggccccaatgtctacaggagccagggggagagagaccctgtgttatttggaaaaaaacagagtctgctctctgctcacaccggacaccagaataaactcccaaaggggcagacagcataaatcagggtaactccagctcctgggattcacctcctctctccctcccactcagggggtggatggaattctcctctggccaaactgaaccagctctctactgccttcactcaggggcgcacgagtctctaactcacaggcgaggatccaggccctctgcccgccaggacaatgacccctctctgagctggggagtggcagccccaggtccacagccagttctcaccctgaggagcatgacatctgggaggggggatgacaggcaccccagggcctgatggtggggacaagccagggtctgattcccatggcaggatgacctgcactctcccagggccacccagccctccagggatgctttatgccttccattctctggtccgagctctgctctggagacacctctgtgcccgagtgtgaggtgcattccctgactgccttaaggccactcctggggagcagagccagtgcctcccgcctcctgccacgcacaacacccagggaccgcctctggttttgggcagagaggctctgagtgtgcccacaggggcccctagggcaggggccaaccatctgggtttgcctgggacttagggctgtcagtgttgaaccaggaaggtatcaagcaaactgcagtgggggtagtgacagagcttaaagaggggctcgggggtgactgaagacatctgggatacagtcagtatgcactgcctgcacctccatccccacctgcacccacctgaacccaactacgcacacctgcgcccatctgcacctccgtccccacttgtgcccacctgcgcccacctgcacttccgtccccacctgcacctctgtccccacctgcacctccaactccacttgtcctcacctgcacccacctgcacacccactgcacccccgtccctacctgcaccccccgcatctccagccccctgccggctccaggcccggggccaggaaactccgtgggcctcctctgccccctcgtggccgccagcggtaacagcagccctctgcaaatcgagcttcagaggccccaggaacaggctccccccgcccccgagcccggcccgtctttgctgttgtcgttgttgttttgccctggggcctgcagaaggataggagcaggggatcacggtgctggttttgtcatcaggacaggcagccacggccctcacttggcggcgcacctgctctcctggagaggctgccacccagaggtcagagacccccgcaggcgcctgcacccctcacagcctcgctctcctccccgtccgtccttgtagggaggtgagtttccaagcttcccaccctgtgcccgcaggagccaaagccgcactcgcccagcccagcgcccagcaaacaggaggtgctcaatgaatgactagcaacattattaaaagatcaggaaaagcccgcatcccacgccaccctttgtaacagagaaccccttcaaggtcagccggcaccacacctgctcaccactaattccgtcccctctactggggcctccccttgcgtgtgtggacatcagagcctgatgattctctggggtggggccgtcctgggcaccatagggtgctgagcagcgtccctggcctccatccactccatgccaggagcatccctccatcatgacaattacagatgtcccctggaggcagaatcacccctggttgagaccccccgggttaggggattccacggacccccaagagactccgcgtcccatgatcctctgccatgctgaggtcccaggaggctgcacacattgaaatccacaccctgagttgggagggagagaggagatgaatcccaggagctgggggtccccctgatttacaccatctgccccatcgggagtttattctggtgtccagtgtgagcagggactgaagtcagttttgaaataatgaatgggccgggtgcggtggctcacgcctgtcaccccagcactttgggaggccgaggcaggtggatcacgaggtcaggagttcaagaccagcctggctaacatggtgaaaccctgtctctactaaatatacaaaagttagccgggcgtggtggcatgcacctgtaatcccagctactcgggaggccgaggcagagaattacttgagcctgggaggcagaggttgcagtgagctgagatcatgccactgcactccagcctgggtgacagagcgagactctgtcagaaagagaaaagaaaagaaaaggggaagagaaggggatgggaagggaaagggggaggggaaggggaaggaggggaaggggagggggaggggagggggagggaaaggggaggggaaggggaggggaaggggaggggaggggaatggaaggggaggggaggggaagggaagagggaggggaggagaagggaagggggaggggaggggaagggaagggagaaagaaagagtctctccctcctgggcactgtagacattggggctggatgattctcttggatggggccatgttgagcagtgtccctgacctccaaccactcatgccaggagcaccccccagtcgtgacaaccagagacatccctagacatctcccagcatcccctggggaggggaggggaggggagggttgggtcagaatcacccctgcttcctccgtgagccccactagcatagttaaatttcaagtagttcagaatttaagtgtaaaacatgcaatcggaacaaaatacaggtgatttttttataatcttaaaatttggaagagatccataaaaaaaacaaaggagatgctcatgtataacaaacatttaaaatcctggccaggtgcggtggctcacacctgtatcccagcattttgggaggctgaggcagaaggatcacttgaggtcaggggttcgacaccagcctggccaacatggtgaaaccccatctctactaaaaatacaaaaattagctgggcatggtggcgaacacctgcaatcccagcttgggaggctgaggcgggagaatcgcttgaacccggaaggaggaggtggcagtgaaccaagatcgcgccactgcactccagcctggacaacagagtgagactctgtcaaaaaaaaaaaaaattcctctttggcaaaacccaccgtaagcaaagtcaaaagacacgctcaggaaaatatttgcagagttcaaacaaacgtttataaactgttcaaacaaatcaatgcgcctgagacgccggaacagaaaggtcagcaaagaccccagcctggcagcccacagaaggatgcccagagaacggtcggattcaccggccaccaaggacacccaaacaaaacaaagatgagcgcccctacttgccagcttggcaaagatttcacagctgcggctgggagggtggggaacgagcgctccaggaaggaatggggtgtttctggaggtttttgtggctggatgtcaaatgtagatggcaggcacagagctcagcagcacatccactcgcaggaatttaacttaaacctcaaccatccaaggggagggattcaggaaggaaggagagagggagggaggcagggagtgggggaggagggggggaagggagggaagggagagaaggagggagggagggggaggaaggaggggggaagggggaagaagggagggaaggagagggtaagggagggaaggagagggtaagggagggagggagggaaggagggagggaaggaaggaaggggagggagaaaggaaggaaggagggagggagagagggaaggagggagggagaaaggaaggagggagtgaaggaagaaaggaaggagggagagaggaaggagggaaggaaggaggggggagggagggaaggaagaaagaagagagggagggaaggagggagggggagggaggaagggagggaaggaagaaaggaaggaaggagggagggagagagggaaggagggagggaggaaggaaggagggagggaaggagggagggaggggaggagggagggaggagggagggaaggaagcggcagagggagggagatagagataggaaggaaggagagagaagggggagagggaggaaggcgagagaaagagagagggagaaggaaagaaagagagaggaaggaaggagagagagaggaagagagaaagaaagacatcaagaaaaagagagacattccaaaagcccagctagggggaccagttaaacacattataaaatcatttttaaagtgataagtcaccaccccctatcacacagagtgccttaacgagcgtcaagaatgagggtggatgtcgaggtttctcgacaaggaaagatgcccagtgatgggaatgaggaatgagagaatagaaccctccttgtgtgaaatctacaggtgaatgtaattcacgaaaatcccagcacaggcttggcaagatgctgaggcccatcggtgctgggctggggaacttaggggcttggccttctttgtacttttcttcattttacctttttagctgttgctttttttggagacagggtcttgccctgttgcccaggctggagtgcagtggtgtgatctcggctcactgcaccactcgatctcctaggctcaagtgatcctcctgcctcagcctccagtgtagctgggaccacaggtacacactgtaacacccagctaattgtttaatttttttgtagagatggggtcttgctatgttgcccaggctagtctcacactcctgggctcaagccatcctcccgccttggcctcccaaagtgctgcgatgacaggcgtgagccaccacacccaggctctcaccaagttctgacgtcaatcagggatcaaagggcttcaggccaaactgccatccctaaaatgacctgcttgagaaacttaagtctatgaaatgaaggggaggcactccagaaactggcagatggtccccagaggtggtacaagaagaagggactcgggtcccgcagctgaccctcagtggctcttagcctcgagaactcagccctgcgatggccagagttgcgcccggcagatccccacggggagcctcttcctctctccttgaggtcacaggcaggtgagtgaccaggcaagggaggaagtcggctctgctcacccctccagcccattccccatgtcagcagaaggaacagcaggctcccagcgacagccccatcctaaccccagaagccgtggacaggtcagctccatgtcaaaagggaccgcagatgggatgaagttaaggatcgtgagataggatagcatccggggtgatctgggggccccaatgtcctcatagcgtcctcaggagaagaggcaggagggtgagagtcaaacagagactggaagaggcttcactgtggctgtgaagggggaggagggggccccgagccaagggatgtgggtgcctctagacgctgggaaatgcgggaaccagattttcccctggagccccaaggagggactggcctgcccacaccttgattttccatgattttagcccagtgaggcctatgttagacttcttttttttttattttttctttttttgagatggagtctcactctgtcgcccaggctggagtgcagtggcgtgatcttggctctgcaacctccgcctcccgggctcaagcgattttcctgcctcagcctcctgagtggctgggactacagatgcacaccaccacacctggctggttttttttgtatttttagtagagatggggtttcaccatgttagccaggatggtctcaaactcctgacctcaggtgatccgcccacctcgacctcccaaagtgctgggattacaggagtgagccaccgcgcctggccctacgttagacttctgagcttcagcgctgtcagataataactgtgtgggagaagccgttctacatcagtagtcacttgttacgtctggggcaggaggtgcctacatccaccagtgcccaaagaggatctagcagctccgatccaggccctcggggcttagtgggcagccccaccagcccacagcctgcctgccagggagctgttctcacagacccccaccatgggacacgtgtttctgggacaggtcatggagaacgatgaccccatcacgggcagtctttccaaaagggcccacgggagatcagaaatcgcaatgtttcttgctgagaattgccgtatcctagcttgcaaacactattagctccgcagctgctagcgtttccctgtcgaaatgaatggggttatttgtttctgttttttagacagggtctggctctgttgcccaggttggagtgcagtggtgcaatcatagcccactgcagcctcgacctccggggctcaagcgatcctcccacctcagcctcttcagtagctgggatttcaggtgtgcaccaccacgcctggctaatttctgtattttttgtagagatggggtttcaccatgttgcctgggctggtctcaaactctcaggctcaaacgatcctccccacttcagccccccactagcagggactacaggtgcgtgccaccatacctgtctaattttctgtagagtttaggatatcgctctgttgaccaggctgatctcaaactcctgggctcaagccatcctcctgccttggcctctcaaagtgctgggattacaggcgtgagccatggcgcccggccagaactgaatgtttgaagaagcccaacaccaaacctgtggcagccccaggaagcaccgggaatgcatagtctgagccctctccgggctctgcacaccttcccgccctgcaccatgtgcaccggaaatgcaggagacctctccgggctctgcacaccttctggccctgccgtcggcacccgaaatgcaaagtctgcgccctctccgggctctacacaccttcccgccctgcaccatgtgcaccagaaatgcaaagtctgagccctctccgggctctgcacacctttccgccttgcgccattggcaccggaaatgctaagtctgagccctctccgggctctgcacaccttcccaccctgcaccatgtgcaccagaaatgcaaagtcggagacctctccgggctctgcacaccttccggccttgcactgtccgcactggaaatgcaaagtctgagcctctccgggctctgcacaccttcccgccctgcaccatgtgcaccggaaatgcaaagtccgagacctccccggactctgcacaccttccggcccggctccgtcggcaccggaaatgcaaagtctgagcctctccgggctctgcacaccttccggccctgcaccatgtccactggaaatgcaaagtccgagacctctccggactctgcacaccttccggcccggctccgtcggcaccggaaatgcaaagtctgagcctctccgggctctgcacaccttccggccctgcaccatgtccactggaaatgcaaagtccgagacctctccggactctgcacaccttccggcccggctccgtcggcaccggaaatgcaaagtccgagacctctccgggctctgcacaccttccagccctgcgcctcctttttcgggctgagcttttctgttggtgtcacagcttcactggggtgcagttacacaccctgcgatgcacactgggcacgctaatcttcaagcgcacatggttctaagggttgccattcatttctacagctatgcaaccatcagcataatctcaatgggacgctgtcatcgactcccagagctgccccgatcccaaccccccagcctccaggcgacctctgatctgtcaccttttctagaattttcctgtaagtggaattgtacaatatgaagtcctttacatttttatgtttggcttcataaataaatattatacatatattttatatctacactttttgcatctacactttattttattttattatttctgagatggagtctcgctctgtcgcccaggctggagtgcagtggcgcaatctcagctcactgcaacctccgtctcccgcgttcaagcaatcctcccacctcagccccccaagtagctgggattacaggtgcctaacaccacacctggctaatttttgtatttttagtagaaacggggtttcgccatgttggccaggctagtctcaaactcctgacctcaggtgatccacctgccttggcctcccaaagtgctgggattacaggtgtgagccactgcacccggcctacactttatatatatatatatatatatatatatatatatatatatatatatatatatataatgctctatctatacatgcatcatgttattgagatgtaattcatatgacatacagtgcacccatttaaaatgcataattctttctgagtattatctgcggcaccaaaaagaagaaaaaaatcataaaataaaaagaaaacgcacaattcaatggcatttagtacattcagagtcctgcaaccatcaccactaattccagaacattctaattatgccaagaagaagaaacccatcaaccatcacttcccatgcccctcccagtctcggcacccacgcatcccctccctgcctctgtggatcggcccgtcctgaaccttttgtagaaaggggatcacatgctgtgtggccttttgtgtctggcatctcttactgagcgtgacgtcctcaaggtacatccacactgtggcctgtgtcaaagcttcattccttttcatggctgagtaacactccatggtgtggatggaggatgttctgctgatccattcacccattgatggacatttggagtctttgccttattgctaaatttgaacatattcttgacttttgagtacatctgtttctgaattacctctcatgaccattgactactaaggatgagaccaaaatgatttatactgggcttagctaaaatatgcatttttaaggtacacattacatgccataaaattcaagtgaagtgtactgctcaaagatacttcagggccgggtgcaatggtacgcacctgtaatcctggcactttgggaagtcaaagcaggaagatcacttgagccacggagttcaagaccagcctgggcaacaaagcaaaccctaactcttttctgtttttctttctttctttcttttctctctctctctctcttttttttttttttagaaggagtttcgctctgtcacccaggctggagcgcagtggcatgatcttggctcactgcaaccaccatctcccaggctcaagtgattctcgcacctcagcctcccgagtagcttggactctaggcacctgccaccacgcctggctgattttcctatttttagtagagatggggtttcaccatgttggtcaggctggtctggaactcctgacctcaggtgatccacccatctcggcctcccaaagtgctgggattacaggcatgagccaccatgcctggccaaaaccctaactcttaaaaaaaaattttgttttaagatttttaagtaagttcaccaggttgcggtcaccccgacccgaccatcgggtccatttccacgtccctggcaagtctctggtgcacattcatgtccccagcctccaatcaccacgagtccctttctgtccctatggctttgccttttctggacatttctgccttcctttctacttatttttaaatggtttcctcttcctacattttaaaagccactcatgattctctagggagaaaaacgaggagtaaatcaacagaggagagctaaagggccagcgacgggtcactctccaggtgcacaggagatacgggtgaaggctccttaaaactccctaccatggcacgaagacaccggaaaggcatgcagcaccgctgtgggcttcccaccctgaccccatccaggggctccggcaccagcaggaccagtgagtgccacgttccctgcctcgtgggcgggaaactctgccaggagctagcagctgttacccacacctgctccccattacccatacttggtggatacaaacagccgacagacccaggtcaaggccaagacgcccgccttgacggcaaccccacgtcttacatccagggtgcaaaacagccaactgaacctcaaatcataacaaagaaatgcattacagcaccgacctgtgcaggaggtctcgccgtctgcagcaccgagatcccgaaaccaagctccactccctggaaaaaacacatagagttagtttggcgtggcttggctggaggcaccatgcatgtgttgatggggtcagcattggagaacggcctcgcgcttgtgattggacaaggacagaaatcattttggcaaccaggcgcggtggcttaggcctgtaatcccagcactttgggaggccaaggcaggtggatcatgaggtcagaagttcgagaccagcctggccaacatggcaaaatcccgtctctactaaaaatataaaaattagccaacgtggtggtgggtgcctgtagtcccagctacttaggaggctgaggcaggagaatcccttgaacccgggaggcagagggtgcagtgagctgagatcgagccactgtcctccagcctgggcaacagggcaagactctgcttcaaaaaaaaaaataatagaaaaggaaaaaagcagaagacaattcactgaaaatatttattattagagatttatgacgttattcctaatacattttccacgtgtttgaaaactgaactgagtgcaaggattgatgtttctacggctcttcacagtttatcaaaaacatctctgtacatctttggagcctcacgatctccctgggaggaagaagaaggggctgagttagtcccacggtgcccagaaggcacccaacgtatccaggtctgcccaggacttttccagagttagcctgaaagtcctgcatcctgggaagtccctcagccccagctcagctggtacgggcagtctctgagcagaaccaggctggcaccacatgcctgaggctgcgaccaggaactccccacctcgggggactcggggggaccctgccaccatcactgacaggacaagctccagggccaaagctgttcctgcaaacaccgtggtttatatgaaatccttgcctccctctggagcctggaatcctggcatgggtcaggcagcaggggcagcagaaccagcccccataggaacgtgggtgctgggtctctgggagcctcgctggtgacagtgctttgggctgttgtcccagctcgctgctggggatgtggcgtgtcccgcgtgacacatggggagagggcctggaagctgggcctagaagccgggcctggcctccccgacccaccccacgagcctttcccttcccaaactctgctctgtgctccatgtcctcttgctgggacaaaccacagtcacaaggaggcctcatgcggagtccagggtcctcccagcgagtcgccccatctctacaaaatgaccccatcttgacaaaaaaaatttaaaaattaggagggtgtagtggtgcccgcctgtgaccccagctactcgagaggctgagatgggaggatcgcttgatcctgggagatcaaggttgctgtgagctaggattgcaccactgcactccagcctaggcaacagagtgcaatcctgtctgagaaaaaataaaaataaatgccacatggggccaggcacggtggctcacacctgtaatcccatcactttggggggccgaggtgggaggatcacctgaggtcacgagttcgagaccagccgggtcaacatgttgaaatcctgtctctactaaaaatacaaaaattagccaggtgtggtggtgggcgcccgtaatcccagctacttgggaggctgaggcaggagaatcgtttgaacccgggaggcggaggttgcagtgagctgagatcatgccactgcactctagcctgggtgacagaacgagaccctgtctcaaaaaaaaaaaaaaaaaaaaaagccacttgggatccaggataggatcctaaaacagaaaaaggacattagaagaaaaaaaccgtgaaactgggataaagagtgaaatttagcttatagaaatgtacccacatgggcttcttggtggtcacaagtatatggtccagcctgggcaacatagcaagaccccatctgccatctctataaaaacaatgtaaaaattagctgggcatggtggtgcaaacctgtagtcccagctacttgggaggccgaggcaggaggatcacttgagcccaggaggtcgaggctgcagtgatctgcgattgtgccactgcactccagcctgggcaacagagcacggcactgtctcaaaaacagaccaaccccaaatgcatggtgacttcataagatgctaacataagggaaaactggtgagaggtagacaggaaatctctggatttctttgcaactcttctgaaaatctaaaattaaaagttcatttaaaaaaaatgcagactttttaaaatgctagtttccgttctacgagctcagggtaatttaccatcaataaaaggtagggatagggagctgaaatcctcactgtcacctgcaggtggtgcccttgccacaggaatgccctggcacccttgggctctggcagcagctggaatcttgcaggatctgctacaccagggcctgccactcaggacagcagcagctcagggcagcagggatgagtgatgaaagggctggagcggcatgcccacggggctgcaggaggcccagactcctgccctccaccttgcagggcagctatgaacataatccttcaactctgaatcatgtgtttttttttttgttttttgttttttgttttttttgagacagggcctcactctattgcccaggctggagtgcaatggtgtaatcacagctcactgcagcctccacctcctgggctcaagcgatcctccttcctcagcctcctgaggagctgggcctacaggtgggcatcactgttgtagtttttatgttctgggaagggggaaggaatgtgcttaatttgtgggctaatttttaattttttaaaaatagagacagggtctttgctatgttatccagcctggtcttgaactcctgggctcaagtgatcctctcaccaccttgtcctctgaaagggctgggattacaggtgtagccatttcacctggacaaccttaaattactgaatgaatttgaagtggtctggtgcgcccttcaactcactaccctgccagcgacaccgtacacaactagggcacatcttatcaaaaccagcaaactgagagaggcggatacattcagtgtagacgctcacccctaggaattattattattattattactttttgagacggagtcttgctctgtcacccaggctggagtgcgatctcagctcactgcaagctccacctcccaggttcaagcaattctcctgcctcagcctcctgagtagctgggattacaggcacctaccaccacccccggctaatttttgtatttttagtagagacggggtttcaccatgttggtcaggctggtcttgagcccctgacctcatgatccacccgcctcagcctcccaaagtgctgggattacaggcgtgagccaccgcgcccagccaggaatcattatttttaaacagccttattgtgaactaacgcctgtaccatacaactcgcccacttgaagtgtataattcattgttttcagtatatttgcaaaactggccaaccatcacctttatgtagttccagaacattctcatcaccctacaaagaagccccctcgccatcagcccccgatccccagccccggcccccacgcacaccctccctgactctgcggatgggtctgtcctggacatttcatagaaatggggtcacacactgtgtggccttttgtgtctggtgtctctcactgagtgtgacgtcctcaaggtgcatccatgctgtgacctgtgtcaaagactcgctcctttccatggctgagtcttactcctcctgagtatggaaggacgtgttttttaaatccattcaccggcggatggacaatcggctcgttccttcttgttggcaattgtgaatctgctgctgtgaatattcgtgtcataggaatcttttttttttttttttttgagacagagtctcgttctatcccccaggctggagtgcagtggggcacgatctcggctcacggcaacctccacctcccgagttcaagcgattctcctgcctcagcctccagagtaactgggatttcaggtacccaccaccatgcctggctagctttttttgtatttttagtagagacggggtttcctcatgttggccaggctggtcttgaactcctgacctcaggtgatccgccagccttggcctcccgaagttgttgggattacaggcaacaatgattcccagccctaggaatcatttttaagatgagttctcactctctgccttcactgcaaacctccctgtccccagccctttaaccccagcccctggctgtcctcaagaccttggacttggcagtgaggcgatccctgcggatgccccttggtctgcactcggcctcagagcagcttgggtcagaggcgagcacagcgtgggtgaagccgcatcccagccgctctgtcctcgggccttgagccgcaccagctggcgccaggctgtcccccagcgaccttcagcggctcactcagcctgacagaaacgctgtgttttcatgttccctgtgtggacaaatcacaatcgacccgggcggccagcagtggagacaaggaggagagacctctccgcgggggttaggtcccctcagaaactgccgagctggggcaacacgaaccgctgggacctcctgttcataaattagtatggatttcaaggcgccaatagcccggctttaaacccagctcagggccctgggcacctatgggcagctggcccttccacccagcaggcaggcaagtctcagacacaggcaagaaacactccaggtagcaggtgccgaatgtcagcagggagagatcagtcccccttgggacacagaggccatggacagtggtggtggtcaggggacctcgtgtacgaagggctgccaccgcctcccggccctccccactgtgtcctggaggcacttctccagatctctgtccgacttccttccttccttccttcctttccttccttccttccttccttccttccctccctccctccatccctccctccctaccttccctccatccctccctccctccctccctaccttccctccatccctccctccctcccttccctccatccctccctccctcccttccctccatccctccctccctccttccctccttcctttcttcctccctccctcctgccttcctttcctccctctctttctctttttctttctctctcttactctctttctgtcttcctttgtctctctctttccttctttcttctttctctttcttttctctctccctttctctctctctctctctctcttttttttttaagacagtctcactctgtcacccaggctggagtgcagtggtgccatctcagctcattgcaacctccacctctcaggtttaagagattctcctgcctcaacctcccaagtagctgggattacaggtgcccatcaccacgcccagctaatttttgtagtttttgtagagatggtgttatgccatattggccaggctggtcttgaattcctgggctcaggcaatccacctgcttcggcctcccaaagtgctgggatgacacgcatgagccaccgtgcctgaccaatttctttctttaaaaaattaaaataggccgggtgcagtggctcatgcctgttatcccagcactttgggaggccaaggcaggcagatcacctgaggtcaggagttcaagaccagcctgggcaacacagtgaaaccccgtctgtactaaaaatacaaaaattagccaggtctggtggcaggcgcctgtaatgccagctactcgggaggctgagatgggagaatcgcttgaacccgggagacagtggttgcagtgagccaagatcgcactactgcactctagcctggacggctaagcgagactccgtctcaaaaaaaaaaaattaaaatattcgcatgccataaaattcccccttgtagaacctggagaatacgatgccaagtgaaataggccagacgctgagagagaaaaacactgcgtaatcccacgtattgtggagtccaaaaacaaaacaagcaaagaaccccaaatacagccaggcacggtggctcatgcctgtaatcccagcgctttgggaggccgaggcgggtaaatcacctgaggttgggagttcaagaccagcctggctaacatggtgaaagcccgtctctactaaaaatataaaattagccgggcgtggtggtgcatgcctgtaatcccagctactcaggaggctgaggcaggagaatcgcttgaacccgagaggcagaggttgcagtgagctgggatcgtgccacctgcactccagcctggggaacagagcgagactccatctcaaaacaaacacacaatcaaaacctcccaaatacatagaaacagaaagcagaagagcggttagtggtagaggagggaaaggaagggggagatgggggtcagaggatacatagtttcagctgtgttggaaacactgagagatgtcactgtagcctgtgaaccagctaaagatattgtactatgggctgggcacaagggctcatgcctgtaatcctagtgctttgggaggttgaggtgggaggattgctgaaggccagaagtttgcaaccagcctgggcaacatagcaagaccctaggccagaagtttgcaaccagcctgggcaacatagcaagaccctatctctacaaaaaatttaaaaatttgctgggcatggtggctccagggatcacgtgagcccagaaggcagaggctgcagtgaaccgagatcacaccactgcactccagcccgggcaacagagcaagactctgactcaaataaataaatcaaaataaaataaaataaataatagaaactgaaaacaaaaaccaggcctcacccacagtgtcgaaggcatgcatcttctagggttattaaggtgctggttgttatttttgcttgtaattctgaaaaggctgatagattttatagcccagtatctccaagcagcgcccaaggacacaaacagccagaccctcagctcccaaacctggggatttgcaacagacaaacacagagctgggaaattccgcagcagggcagatgagggatcgatctgagtcccatgatcctcggccctgctgaggtcccaggaggctgcacacattgaaatccacatcctgagtggggcggagggaggaggagaatcccaggagctggggggcccccctggtttataccgtcttccccatcaggagtttatcctggtgtctggagtgagaagggatcgaagtctatttttttccagatgaatgtagggtctccccctcggcactgtgggcattggggccggatcattctctggggtggggctgtcctgggcactgcggggagctgagcagcgtccctggcctccacccaccccatgccaggggcatcccccatctagagctgttccgttgccttgaatttctgccctctggcctcccctgtcctcatccttatgggatcttcagatggtgcccttgaggcccagggcccgtgtcccctcctcactcagccctcctatccacaggtgactcacagtccccttggcaccacccaggcgctgtccctggcctcgcccatggctaaccttggcaggcatccccaacagaggcgaggggacagctctcgcctgcctcggcgagcccgggttccagaagatgtgcccagcaccctgggccccccaccgccgggtctgggacacagatgctctcctccaaacctcccattcagaccctcgctgtggcgggggcggggccgtgtcttttgagactctgcatatgcacgagggggtgagtttgagtgaggcggtctccatgcagaggaaggtctttatttaggaagccaggtgggggcggggccggctggggaggagaggcggagaggaaagacgagcttctgcagatttcaaacctgtcatttcttttctgacgcataccctcccctcccgcttcatgacaagctctgttcccaccttccccgggttcccagagcagcctcctagacacgatccgaaacagcacgggtccccctcccaacccccaggcactatggacattagagctgggtcactctctggggtggggccatcctgggcactgcagggagctgaacagcatccctggcctccacccactctatgccaggagcacccccagtcacgacagtcacagatgtccccagacattgcctgatgtcccctggggaacagaatcatccccagaaagacctcctcagttagggggttccacagatccccaagagactgtgtcccatgatcctcccccttgctgaggtcccaggaggctgcacacattgaaatccacaccctgagtggggggagggagagaggaggagaatcccgggaactggagtcccctagtttatgttgtctgccccattgggagcttattctggtgtctgttgtgagcagagacgcaattcaattatttttttcgaaataatgaatgcagggtctcccccctctgcactgtggacattggggctggaccattctctgggctggggccatcctgggcactgcagggtgctaagcagcatccctggcctccacccactccatgccaggggcacccccgagttgtgacaaccacagatgtccccagacattgtccagtgtcccctgggaggcagaggcaggaggactgattgagctcaagagttcaagaccagcctggaccacatagcaagaccccatctctacaaaaaaaattttaaaacatagccaggtgtggtggtctgcacctgtgatcccagttactcaggaggctgagatgggaggattgctgagtctgggaggtcgaggctacagtgagctgagatcacaccactgcactccaggctgggtgacagagcaagactctgtctcaaaaaaaaaaaaaaaaaccacacacacacaaaaacaaaaagagaccctatctcaaaaaaaagagggggttaaataatctgactagatacctctcaaataaagacacgcaggcagccaacaggattatgaaaaaacgctgaagatcattaatcagccaggaaatgcaaattaaaaccaaaatgagatacctgttagaatggctatgatccaaaagataaaagataaaaaacattagtaaagatggccgggtgcggtggctcatatctgtcatcccagcactttgggaggatgaggcaggcagatcacgagttcgagaccagcctggccaacatggtgaaactctgtctctactaaaaatataaaaattaggccgggtgcggtggctcatgcctgtaatcttagcactttgggaggctgaggtgggcggctcacaaggtcaggagatggagaccatcctggctaacacagtgaaactttgtctctactaaaaatacaaaaaaattagccgggcgtggtggcgggcgcctgtagtcccagctactcgggagcctgaggcaagagaatggcgtgaacccgggaggtggagcttgcagtgagtcgagatcgcgccactgcactccagcctgggtgacggagagaggctccgtctgaaaaaaaaaaaaaaaaaaaaaatacatatatatataaattagccaggcgtggtggtgggcacctgtaatctcagctgcttggagactgaggcaggagaatcacttgaacctgggaggcagaggttgcagtgagccaggatcgtgccactgcactccagcccgggtgacagagtgagactccgattcaaaacaaaaaaaaaaaaaagaaagaaagaaaaaaaaaagaaacattggtaaggatgtggagaaaagggaaccctgtgtgctgttggtgggaatgtaaatgagcacagccattctggagaacggaatggaagttcctcaaaaaattaaagatagaaccaccatatgatccagtaatcccacttctgggtatacatccaaaggaaatgaaatcagaatctgtcagcctcattcacaatagccgagataggaaaccaacctacatgtccatcgttggatgaatggatacagaaaatgtgaggccgggtgcggtggctcacgcctgtcatcccagcactttgggaggccaaggcaggcggatcacaaggttaggagttcaagaccagcctggccaacatggcgaaaccctgtctctactaaaaatacaaaaattagccgggcatggtggtgcacgcctgtagtcccagctactcaggaggctgaggcaggagaagcttgaacccaggaggcgggggttgcagtgcgccaagatcacgccactgcactccagcctgagtgacagagtgaggctccatcaaaaaaagagaaagaaagatgaactagaccagaggttggtaaactctggcccatgggtcaaatgcagcccactgcttgcttttgtacataaagttttattggcacacagccgtgcgtgttcacttacatatcatccatggctgcttctgggctcctacagcacagctgggaggcctcgacagagagcacatggcctgcaacgccaagaatttacctccggccctttaggaagggttgatataatccgtgtactagagttagatctcagaggaccttgaatgccagaaacgagtaagtcctaatgatttttagcaaagagtaacactgtaaaaccaaatgtttacagatttcatgtgctggaatcctctgggggtggggcagcggagaggccttaaaacatgaaacagcgtcagatcaattttcaatgattgtcttcaaaattaaaactggctcattacaggcgcggtggctcatgcctgtaatcccagccctttgggaggtctaggaggacagatttcttgagcccaagagttcgagaccagcctgggcaacatggtgaaacccggtctctactaaaaatacaaaaattagttgggtctggtggtgcacacctgtagttccagctactggggaggctgaagcaggaggatgtcttgagcctaggagttcgaagctgcagtgagctgaaatggtgccactgcacttcaccctgggtgacaaagcaagaccccgtctcaattaaaaaaaaaaaaaaaaaaaaaaaaatatatatatatatatatatatatatatatatatatatacacataataacatttatcctaaaaagagaaacagtacaaaggcactcagagctgaaactcaaagtcgtctgccagtctctaactcctgacttttgggtttcatgtcctgctttataggactttttgaattctgcccccaaggatccttttcaaaaatcttttgtttcagccaggcacaggggcttgtgcctgtaatcccagctactggagaggctgaggcaggaggatcatttggagccaggagagctggagaccagcctgggcaacatagcaagacaccatcttttaaaaaaattttgtttctgttttggaaaaattttcgatttacagaaaagttgcaaatctagtccaacgttccctatgggcagcaggcaacctaggtaccgaggcaagagactgagggcacgagctgcctggctctgccttcgagatagcagtaacagaattagtgaaagtactaaaagtctctgaaatgcggaaataatggcgtaagctgtctcctctctctctctctctctttgcctcggctgccaaacagggaagggccccatgtccagtggacacatgaccttacctatcattggagatggctcatactccttaccctgcccccttgtcttgtatccaataaataacagtgcagcctggcatttggggccactaccggtcttcatgtcttggtggtagtggtcccccgggcccagctgtcttttcttttacctctttgtcttgtgtctttatttctacgatctctcgtctccacacacggggagaaaaacccacagaccctatagggctggaccctacagttctcaaacgcccctcacccagtttcccctcatgttagtatcttacatctggggtctgcaaattttttctgcaaagggacaaaaagtaagtattttatgctctgtgagctaaagggtcactgttgcatattcctctttgttatttgtttttttacaacacttttaaaatggaaaaggctttttagccccgagctttataaaaataagccaagtataaacaaaacgtggtacatcccccgaaaccaaaatgtacccccgtgttcacagcagcacgattcaccacaccccaaaggcagagacacccaagtgaccaccgagagatgaatggataaacacaatgtcatccattatgccacggaatatgattcagcctgaaaaaggaaggaaattttgacatgggctagagagtggatgaactttgagggcatcacgcccagtgaaatgagccagatgcaaaaggacaaatcctgtgtaactccacgcttaggaggtccctagagagtgagccacaccaaatgtaaactgtagctgttagtcaataatcatgtatccactggctcattagttgtaacaaatgtagcacattaatgagagagggtaacattgggggaaatgcgtaccttttcggggagaggagataggtgggaactctgccttctgctcaattcttctttaggcctaaaactgctctaaaaatagtctattaaaagggggacttgaagagacaaattgtgagagttgtatcacgaaccaagcgttctgatttttttttttttttgaaatggagtctcgctctgtcacccaggctggagggcagtggcacaatctcggctcactgcaagctccacctcccgggttcatgccattctcctgcctcagcctcccgagtagctgggactacaggcgcccgccaccacacctggctaattttttgtatttttagtagagacgaggtttcaccgggttagccaggatggtctcaatctcctgacctcgtgatccgcccaccttggcctcccaaagtcctgggatgacagacgtgagccactgcgcctggccttgattttttttaaataaaggagaggagggccgggcgcggtggctcacgtctgtcatcccagcactttgagaggctgagatggggggatcacctgaggtcaggagtttgacaggagtttgagaccagcctggccaacatggcaaaactccatctctactaaaaatacaaaaattagccaggcatggtggcacttgcctgtaatcccagctacttgggaagctgaggcaggagaatcgcttggacctgggaggcggaggttgcagtgagctgagatcacgccactacactccagcctgggaaatagaggagtgagactccatcttaaaaaaaaaaaaaaaaaaagagaggaggggagggaaagagggagggaaggaaagaggaagggagaggaagagggagaaagggtgggagagagaggaaaacagagtgagagggagggagagaggaagggaaggggaatgagtgtgagcgagggagggatggaggaaggaaggaagggagggagggagggagggatgagggaaggaagaggaaaggagagacacccactttagacaacatgatccgtaagcactgacatttatgactggatccccttccacaagcttcctgaataagccccagagagaagactggtcagtcttggccaaatggattttctgctttcccccgagcccctgtgagtatcatcacaatgtaataccatgaggatcaaaatctcctggccacttaagcctggattaacccacaccagagccatcctcctcaccgaggggccatggcggcgagcggatcacacagcagtcctcatggaatccgtcccaattagcctctgtcggattactcacagaacctgccatccgtggaaggcagattagcctaggatgcatgtgtaaatcccatttggtgaacgaaagcatattctggagatgattagcttatttctgcaagatggcatcaagtgggagataacacatcttcatccccgttacacccacaaggctctgtgtaattctccctgagcctcatccctttccaatcctgattccctgtgggagaaacacaattccttccattgaagggttgatgctgtgggtaagaccttttcatcctcctgctccaaaaccacagggaagggagaaactggacgtatatttttcatctgtttaccatgttcctgccctcaaaggtacaagaagacaagctagaaagtagacgaggctgggtgtggtggctcacgcctgtgatcccagcacgttgggaggctgagatgggaggatgggggcctaggagttcaagaccagcctgggcaacatagtgagacacccccaccaccaacaccccaccaccatctgtacaaaaaatacaaaaattagccagtcgtgatggtgtgcccctgtaatcacagctacttggaagcctgaggcaggaggatcactggagcccaggagttcaagactgtggggagccatgctcataccactgcactccagcctgggcaatggaggaagaccctgtctcaaataaataaataaagacacagtgacttttgcttgttctttcttgggtcatgtgttctgggggaagccagctgccatgttgtggggaaatgcaggcagtgctgtgaagaaatccatgtgttgcagaaatgggccctccaggccgggcacgttggctcacacctgtaatcccagtactctgggaggccgaggcgggcagatcacctgaggttgggagttcgaggtcagcctgaccaacatggagaaaccctgtctctactaaaaatacaaaattagccgggcgtggtggtgcatgcctgtaatcccagctactagagaggctgagacaggagaattacttgaacctgggaggcggaggttgcagtgagccaagatcgtgccactgcactccagcctgggcaacaagagcaaaactctgtctcaaaaaaaaaaaaaagaaaaggaaagaaagaaagaaaagaaagaaagaaagaaagaaagaaaagaaagaaagaaagaaagaaagaaagaaagagaaagaaagaaagaaagaaagaaagaaagaaagaaagaaagaaagaaagaaagaaagaaatgggccctccaggctgggcacagtggctcatgcctataatcccagcactctgggaggccaaggttggggcaggtcatttgagatcaggaatttgagaccagcctggccaacacagtgaaaccctatctctactaaaaaaaaatataaaaattagccagtaattggctaattactgtaattatgcctgtaatctcagctactcgggaggctgaggcagaagaattgcatgaatccaagaggcagaggttgcagtgagccaagattgtgccactgcactctagcctggctgacaaagtgagactccattaaaaaaaaaaaaaaaaaaaaaggaaggaaggaaggaaaaaaggaaagaaggaaggaacgactcatttgggcattttgccctcctgtcaaggccagttggaagctgaggcctccaccaacagccacatgagggcgccctcttgaaagcagctcctccagctccaatcgagccttcagatgatacagccccagcacattcactgccagaatcacccagtggagctgcttcctaactcctgagtgagggtggaaaaaactcaaactcaaattgcttttcctcttgctctcacatcaacagcaatcaacatggccaggtgcagtggctcacgcctgtaatcccagcactttcagaggccaaggcaggtggatcacttaagatcaggagtttgagaccagcgtgaccaacacggtgaaaccctgtctctaccaaaaatacaaaaattagccaggcgtggttgtgggcacctgtaatctcagctactcaggaggctgaggcaggagaatcacttgaacctggggggcggaggctgcagtgagcagagattgcaccattgcactccagtctgggcgacagagcgagactccatctcaaaaaaaaaaaaaaaaaaaaatcaacccaagatatttctgtgaccaaatgtgagaggagtttccccacacaccagctagctgtcccctaattcgattcagttcaattcaattcaggtgctatctacctggagacagccttggaccccacaggttgagggctaaatccccccacaagactgcccctaacctcttcagataccagtagcaagtttgggcctccagaacttccaactgaccagcttgaagttagggttgggtttaatttactacagcagctctcggaattcagggaaacacatttactggtttaatataaagcatattacaaagaatacagacgaaaagatgcataggatgaggtatagggaagaagggcaaagcttccttggcatgctacccttcaggaacctccatgtgctcagctatctcaaagttctccaaaccccgtccttttgaagttttatggaggctttacttcataggcatgactgatcgcgtcactggccactggtcatcacctcaaccttcagcccttctcccctccccagaggctggagggtacagctaaaggttccagccctctcatcctgccttgatctttctggtggccagaccattcctgaaaataactagaagctgtcagccatcagtcgacttatcatcatacaaaaagacatgactttgcagattccaaggattttaggagttctgcaccagaaaaaaatcaggacaaagaccaaataatataataaatataatgcaagtaatataatatcccactgacccacagaaactgcaggatagtaaatgcttgctgtttaagctaagtgttggggtaatttgttacacagtgatagataactggtacatctgcaaagggaaggaagggctgatccacatgactcctccaagcagatgttgctatagtttgaatgtgtctcccaaaaagcatattgtagaaactttaattcccaatgccaccatgttgagaggtgagaactttaagaggtgattaggttatgaaggccctaccctcattaatgccatctctctttctctctccctctcaccctttctctctctctcccccccctcctctttcttccccagttccccaatctttcatatatgtgctcttttgcccttccacctctgacgcagcaagaaggccctcaccagatgccagcacctcgacattggacttcccagtccctagaaccgttaagaaacaaatctctattatttataaattatccagtctatggcattccattatagcagcacaaaataaagacaggtgtgtagtcaaacattaccttttcctaaaagccagcaattggatttttcattttcttgtttttccaatatctatcaacctgataattgggagagatgcaaaagcccagatggataaggtacattcactgagggcaaatcagaagaatgaccaggccaagaaaatgattcattttggcattttgcaaattatcaagatatgcatgccagcaccagtttttaaaactgaacaaatccactggcttttatctatttcctactaaagcaacgtggcttgatcttgacactattaaactggggcttgattattctctggggtggggccgttctgggcactgcacagtgctgagtagcatccctggtctccacctactccaggccaggagcacccccaagtcacggtacccacaaatgtccccagacattaccagtgtcccccagggggcaggcttgcccccagttgagacccaatgctctaaggcatgtccctcaagggcaggacagccagggacctgacatttgatgacaggcctatcctccaccgccccccaggcccggctgcacttcctcctctgggaactgagtgggcaggacgggctgtcagagcccccttcccttcccacgctgacattctgccagcacgtggcaggggcgtcttgtctcgttggaggctggatatagaaacacagccctgtcctttgtgccatcgctgaagttgtcaacctcagccttcactcatcaccacagcaaccatctaaatatgtcaccagcaaagtgctgattgcaaaggaagggggcagagaggcctggacgggctctcacccaggtgcaggcgcaggggaggtgccgggactgggggagtgacgtggctgcttcagagccacgagactgatgacggccaggccgggcgtgacctggaacaggctccactgcaccctggggcacacagaacaaaggggcaggcctgcttgaccctgagggttcaaggtctctgtgagccgaggtcaaggagggggaaggaacaatcagacggttggctctgtgtcctgcaccctcagtgctctagagaccctcctcacccagtcctctaggtcactctgggaggatggccccggctgacaccgtctgccccatcgggaatctattctggtgtctactgtgagcagggagcaaactcatttttttgccagttaatgcaaggtctctcccctggaaaccgtggacattcagagctgggtcattctctagggtgcagctgtcccggacactgcagggtgctgagcagtgtccctggcctccacccactccacgccacgaccatcctcaagttgtgacaacgacaaatgtcctcagacaacacccagtgtcccctggggcagaatcaccctcagttgacaccccctgaattaggaaattccacggacccccaagatactctgtcccctgatcttctgtcctgctgaggtcccaggaggctgcacacattgaaatccacacctttagttggggggagggagagaggaggtgaatcccacgagctggggtcccctggtttacaccgtctgccccatcaggagtgtgtcctggtgagcaggaagcagactccatttcttctccaaataatgaatgctgagtctctcctcccaggcacggtggacactggggctgtaccattctctgggatggagccgtcctgagcactgcagcacgctgagcggcatccgtgacctccagccactgcatgcccggagcacttctcaatggtgacagccacaaatgtccccagacatggcccagtgtcccctgggggggggggggcaggatcaccctgccgtgctggacagtcctcgccacaccccacctcttggaactggaatgtctggtgagacgggcaacaaggatttgggaagagggccatgcgggacaaaaaaaagaaagaaaatgagaacgaacggatttctatttcccctcaatgtgaaaatagctccactgagtcccgaggaaggattgggtggggacgtacgctctggtatggccaaggtggagtgctggacaagagctactccattctgacttcacgactcgctgtctggctgggtgaccttcagtcccttgccactgtcgctgtgcctcagtttcccactctgtagaatgcacatcgaagcagcatccaccctgtgagactggttttggagattacataaatgagtatctataaaatgtttaaagtggtgtctgagccatgggtcatggcacatactggctttattatttagaacctggattacctccttttattattctttttcaatttattttacttattttttgagatggagtcttgctctgtcatccaggctagagtgcagtggtgcgaacttggctcactgcctctgcctcccgggttcaagtgattctcctgcctcagtcccccatatagccagtattagaggcgcccgccaccacgcccagctaatttttgtatttttagtagagacagggtttcaccatgttggtcaggctggtctcgaactcctgacctcaggtgatctgcctgcttcagcctcccaaagtgccaccgtgcccggcttatgttttaatttttattgtatttatttattcatttttattttgagacagagtcttgctcttgtcgcccaggctggagtgcagtggcacgatctcagctcactgcaaactcagcctcccgggttcaagggattctcctgcctcagcctcccgagtagctgggattacaggcacctgccaacatgcccggctaatttctgtatttttagtagagatggggtttcgccatgtcggccaggctggtcttaaactcttgacctcaggtgatctgcccacctcagcctcccaacgtcctgggattacataggtgtgagccaccatgcctgcttttttagtttttacttttcatagagataggatcttgctatgttgcccagactggccttgaactcctgggctcaagcgatcctccctgctcagcctccccaagtgctgggattacaagtgtgagccaccttgcctggccagattacctcctttctggactagaccagagcacagcaaagtgtttctgtctagggcaggatgtaaaaattttcagccttacggaacatatgttctctgttgcagctacacagttctgctgttgtattttgaaagcagccatagactatgcataaataaatgggcatggcccatcgtgtgccaataaaactttatttatagtaacaggtggcctggatttgcccccaaggccattggttgagaccctcgcaaaacagtctaagacaaaatagcaccatttcagcaactaaatactctcatctaggcagtgttccagtcttccatcctgaaattagatgagggtcctgtcaaaaaagattcacctccgatcctcaacatcacacggcagagttagcacagagcatcccttcacacaaaacacacactcatccgggcgcggtggctcacgcctgtaatcccagcactttgggaggctgaggcgggtggatcacttgaggtcaggagttcgagaccagcctggctaacatggtgaaacccaacccgtctctattaaaaatacaaaaatcagccgggcaaggtgctgcgcctgtaatcccggatacttgggaggctgaggcggcagaatcgcttgaacccgggaggcggaggttgcagtgagcagagatcacgccactgcaacccagcctgggccacagagtgagactccctctcaaaaaacaaacaaacaaacaacaaaaattttcacagccccaaggttttgtttctttgaaatgcagaaaacggctgtttcttttcttaccatctatcttctgtgcgtgaatacctcacctctatgtgctcgccagaaaacctcggctgcaaagggcattcggaatatctcatttggggccaggtgcagtgactgacacctgtcatcccagcactttgggaggccgaggcaggaggatcacttcaggccaggagttcaagaccagctggacaacacagtgagaccccatctctacaaaaataatttaaaagtaggccgagcgcaatggctcatgcctgtaatcccagcactttgggaggcggaggcaggcagatcagctgaggtcaggagttcaagaccagcctggccaacatggtgaaaccccgtctctactaaaaatacaaaaataggccgggcatggtggtgggtgcctgtagtcccagctactggggaggctgaggcaagagaatgatatgaatccaggaggcagagattacagtgagccgagattgcaccactgtactccagcctgggagacagagcaactctgtctcccaaaaaaagaaaaagcaaacaacaacaacaaaaaagaaaatctgaaaaactgtcacaggccagagatgggatcctggatggggccctggggcaggagaggacattagaggaaactgaggaaatctgaacagagtgcagacttgggttaatgaagatgtatcaatactggtttattcgctgtgacaaacgcaccatgccattggatgtgaatactaaggaaaattgggtggtgaggagatgaaactgtctgcactgcattcccagtttttctgtaaatctgaaactattctaaaatgaaaagtttatcaaaaaaaaaaaagagacagagagaagagaaggacgacaggcaattagctacttacgctagaaaatgctgtaaaatgtgattgagggaacattaagttcatgtgccagcatctaataatgagatgattatgtaaaacctagaaaagaaagacgctaaaaacgggatatgcaaattggcaggggaaatttgcgcttatgaaaagaatgggaggggtgggggaaccagtggctgggcggttggtcttgtctcctgtttccctggctcggtgacggccaccaaggaccccaaccccagggagatggaggggctgctggagggagcccccggaacacccgaggccaatttcggcagcatggtgtattccctaccaaggctgtcggcatccaggcagcgctcaatgaatgcctgctaagggtgcagccgctcctgggctggaggagggctgcagttttatggatggaaagttctagaaaataagggtgatgctgtggtctgaaggaagaagcaagacaactgataatatgccgtgacatcctgatctttgcacagcgggttagatattgtcacccacacctggtgctgacatttggggccaatggctgtggtagggggctgtgctgagtaccgcagggtgctgaggagcatccctggcctccatcctctctatgctgggaacacccctcaaccgcaaatgtccccagacattgccaaatgtcccctgggaagtaggatcattcctgctgagaaaccacggtcccacaatatccagcttaatccacctgacaaccccataagggatacatataatcctccttccacagatggggaaacacactgaaacgaggtaaagtcagctcaaggtcaccaccctaggagtaagtctcaaagaagggggtggtcgtgtgtgttgactgccactttagtaacagagacccctatgctgggcaatgctggtctaacatggcaagaatcagaaaactaccgctgtgggttgggcgcggtggctcacacctgccatcccagcactttgggaggctaaggcgggcagatcacgaggtcgggagttcgagaccagcctgaccaacatggtgaaaccccatctctactaaaaatacaaaaattagctgggcgtggtggtgcatgcctgtaatcccagctacttgggagactgaggcaagagaatcgcttgaacccaggaggcagaggttgcagtgagccgggatcgtgccactgcactccagcctaggtgatagagtgagactctgtctcaaaacaaacaaacaaaaacaaacacaaacaaacaaaaaaactaccactgtgggtcaaatccagcccaccacttgctttcgtcaataagttttgttgaaatacagccatgcccgtttatgtactatctagggcactttccaacatcaacagcagagttgagtgcctgcaacggagagcgcctggctcagagcgtcgaaaatatttactctctggctctttacagaagaggtctgttgatggctgggtgcagcggctcatgcctgttatcccagcactttgggaggctgaggcgggaggatcacttgaggccaggagtttaagaccagcctggccaacacggtgaaaccccgtctctactaaaaatacaaaaattagccaggcgtggtggcgggtacctataatcccagctactcgggaggctgaggcatgagaatcacttgaactcgggaggtagaggttgcagtgagctgagatcgcgccaatgcactccagactgggtgacagagcgagactctgtctcaaaaaaaaaaaaaaaagaaagaaaaagaaaaggtgtgtggacacctcacaagacagagccccagagccctacatcattacttcaaggcctctgactgttttcttttgaaactctctgtctctctctctctctgagtgctccgttaatattttgttggaggaacaaaaacagcagggtcagcctcctcagggggtgaaataagctctgtctggtgcagcctggttctggccacggagacccaccctcccctcagcctggctccagaggaaggagcaccagtggggatagacccaccccactgtcgggggagcagagactggcagcaggcctgcctctgaggcccccgcgggagccgtgctgtcacctcgaccccgctgtcacgggggacagagctgaggcctgcgctcccagcgccggtgtctgcaggcacacaggtcaccctgactccacaaagtcagccctgcagcctccagacggtcagacttgctgagctaggacggccactgcgtcccatgtggcttgttttcccagaccctgagctgcctcgggcatggctgtgtgacgggtgtggagattcacagagcaccctattctctgagggtcactttggtccagggtctcctcccctaggcactgctgaggcactggggctggagtgttctctcgggcggggctgtgctgggcactgcagggtactgagcagcatccctggcctgcacccactccatgccaggagccctcgccccgccccccacaagttgtgacaaccacaatgtcccagactttaccaggtgtcccctgggggacagaatcatccaccattgacaccccctgggttacagattccaaggaccacccctcccacaaagagacggcgtcccatgatcctctgccctgctgaggtcccaggaggctgcacatattgatatccccaccctgagtggggagggagagagggggtgaatcccaggagctgggggtccccctgattttgggagtttattctggtgtctggtgtgagcagggagcagactcgatatttttccaaataattaaagcagggtctctcccccttggaattcaaggatggatcgttctctgtggtcaccctgggcacggcagggtgctgagcagcatccttggcctccacccagtccatgccaggagctgcccctctcttaactgtgacgaccacaaatcagtacccaactatgtttaaaactctccagctgatctcagacaacccaccttccaccaactcccagcagctcaggagcctttctgatgaccaccctggcagttgcaggaaggccgaggaccaccccggatccccctggacaccggtggctctgagcctcgacctggccagcaccagccaaaaggaccaaccctccaagtgctgacgaacgaggtgaatgaggctcaaggtgacgttgtccggcctgccttctgcctcacacgcttcccccagcttcagccgcctccccgagacccgagagctggggaggagccaggcaggggaacgttcgtcctggctgagctccgaggccatgtccaggggtcatgaatttgaggtcagccctgaggcgggaaggtgacgggtagcatgcggagccccagagagacaacacctggcccattcaaagggcatcaggcaccgctcctgccccagtgggtgtgaagcccaatgtcatcagctcctccaactactctgagaagctgggagatgttctattgtaaaatctcctgatttttagtttcattttattttattttatttttttttaagatggagtctctgggaggccgaggcgggtggatcacgaggtcagcagatcgagaccatcctggctaacacagtgaaacctcgtctctactaaaaatacaaaaaattagccgggcgtggcagtgggcacctgtagtcccagctactcgggaggctgaggcaggagaatggcatgaacccgggaggtggagcttgcagtgagccgagattgcgtcactgccctccagcctgggtgacagagtgagactccgtctcaaaaaaaaaaaaaaaaaaagatggagtctcgctctctcacccagtggcgcagtctcagctcactgcaactgctgcctgccaggttcaagcaattctcctgcctcagcctcccgagtagctgggaccacaggcacctgccaccatacccagctaattgtattttcagtagagacagggttttgccatgtgggccaggctaacctcaagtcatcctcctgcctcagcctcccaaagcactgggattgcaggcgtgagccactgcacctggcctatttttaaatattttgtagagatggggtctcactgtgttgcccagggtggtctagaactcccagcctcaagcaatcctcctgcttcagcctcccaaagtgttggaattacaggtgtgacgcccgatttttttttttttcttttgagacagagtctcactctgtcatccaggctggagtgcagtggtgcgatctcagctcgctgcaaaccctgcctcccatgttgaagcaattctcctgcctcagcctcctgagtagctgggattacaagtgtgtgtcaccacaccggctaatttttgtatttttagtagagatagggtttcaccatgttggccagcttggtctcaaactcctggcctcaagtgatttgcccgcctcgacctcccaaagtgctgggattacaggtgtgagccaccgcgcctggtctgtgacccctgatttttaaatgctggcaataattcaaagtttaaagccactgggttctaccttggccaggtgaccaatgtcaacaccaccagtgtggacgtcacgtgcccctgatgtgttctccccagagccctgaaccccagactattcaagagcaaacatcatggaaactcacgttgggggacattttacaaaactcctgacgagtcctcctcaaaaccactaggttggccgggtgcggtggttcatgcctgtaatcccagcactttgggaggccgaggcgggcagatcacaaggtcaggagatcgagaccatcctggctaacacggtgaaaccccgtctctactaaacaatacaaaaaattagctgggcgtggcagcgggcgcctgtagtcccagctactcaggagggtgagccaggagaatggccgtgaacccgggaggcggagcttgcagcgagctgagatagcaccactgcactccagcctgggtgacagagcgagattccatctcaaaaaaaaaacaaaacaaaacaaaacaaaacaaaaaaaaacccagcaggtcatcaaaaccaatgagtctgagaagtgtcccagcagagtgtaaggagatgtcgggagtcaatggcatgtgggttcctggaaaaaacaagaaaatggaaataaagaccgggcgccgtggctcacgcctgtaatcccagcactttgggaggccgaggcgggcggctcacctgaggtcaggaattcgagaccagcctggccaacatggtgaacccctgcctctattaaaaatacaaaaattagccgtgcagggtggcaggcacctgaaatcccagctacttgggaggctgaggcaggaggatcatttgaacccaggaggtggaggttgcagtgagccaagatcacaccactggcactccagcctgggtgaaagagcgagactccatctaaaaaaaaaaaaaaagaaagaaagaaagaaagaaaaataaaatgtaaataaagtgtggagttgagttcgtgataatgtatggatactggtctttttagaaaatttctttctttctttttttagagagagggccttgtactgcttttgtatattttaaacatacaattgtgtatatttccaatatatttcagagttttcttaggatacatttgtgataatttgttacacagaattagctaactaatataggctgtttccaaaattcaaaactaccctaaaagaaatctgaggccagggaccgtggctcacgcctgtaatcccagcactttgggaggccaaggtgggcggatcacccaaggtcaggagtttgagaccagcctggccaacgtggtgaaaccccatctccactaaaaatataaaaactagccaggtgtagtggcaccttgcctataatcccagctactccagaggctgaggcaaaagaattgcctgaacctgggagccagaggttgcggtgagccgagatcaccccactgcactctagcctgagcaacagagtgagactccatctcaaaaacaaaacaaacaagaaaaaagaatctgaaatataatggaaatacacacaattgtatgtttgaaatatacaaaagcagtacaatccactcttgaagggaatcagaatcgtcacactgctgggaaaagggcaaggtctccaaaggtgactggtgtttttgttttttgtttttgttttgtttttttttgagacagagtcttgttccgttgcctaggctggagtgcagtggtgcaatctcagctcgctgcaacctccacctcctgggctcaagcgatcctcctgcctcaacctcccaagtagctgggattacaggcgcccacaaccatgcccggctaatttttgcatttttagtagagacgagtttttaccatgttggccaggctggtctcgaactcctgacctcaggtgatccacccgccttggcctcccacagtgctgggattacaggcgtgagctactgcgtctggcctgcaaggtgactgttttaaaacacagaggacacctgctgagatgcaaagtcagggagtgttgaagaaaacagagatctccttatgtgatggtcgtaactcgcatttccaccctcgacagcgccgactccatcgggcagcttttctacatagtcaagtttgaaaactgtgccattgtacgtcaccagaaacggactcggttagaaaacaatgctctttcgtaatgtataccgtactacttttcctaaaacggaactgtcataacgcctccccctctggctgagactagaatagataaaaatccagattttcacacactcgggactggtaatgttttaacacatggaaaacgcgacagggttacagactgctttagcttctccaaacaaatccgcaacggcgccaagcactcctaacagttggacgtgttcataaatgaacccaaacagatcacgttctcggagacggatgcacgccagaaattcctgtcgtgcccctgaagaactaacaggtctctctctgcaacggtggacgactggtcaaaccctggaaccagccaggaacagcagcaagtgcacgggctcgggaatgggaatctggctttatggaacctccaggctcaaggggacaccaggaagggacagcttcgtgaccaagcccggtgtgacccaccaaaaatctgcaaccacgaagaccaggaaatgccagcagtgccgagcaggagaggtcgcttgacggtaaagaagcagggagcgttatttagcaaaccaggctggttaaagagtagagaatatcagatgtcgcggcccctctgcagaggacagttctgaaggacagcgatgacctaaattggctcctatgagggactgctgggggaaatatttccccaggatcctataagatacaaagaaaaacatatgaaaacagaaaagatattcccgacacttgggggtctcaatggggcgggggaggtctgaggacatctgtggttttcacgattggggggagctcctggtatggagtgggtggaggccagggacactgctcagcaccctgcagtgcccaggatggcccctccccagagaatgatccagccccaatgtccacagcaccagggggaagagactcaaagttaattatttggaagaaaatattgttgagccagatgcctcagaatgggaccttatttggaaacagggtttctgcagatggacttattattaagatgtggttgtgctggattaagatgagccctaaatccaataactgatgtccttataagacgagggaaatttggacacagacccacacagggaagggggccgtgtgaggatggaggcagagactggagcgatgtcaccagcccaggggcgccaagaaccgccggccacttgccagatgctggaagaggcaggaaggatcctccccgggagcttctgggccgggaacggccctgcccacaccttcgtctcagacttctggcttctagaactgccagaaaatccatttctgtggttttgagccatgcaggttgaagtcattttccatgggcgccctcaaatatccaaacttcaccccacagagaccctcccctaggcacccacatcctggcatgttcagacaccctcctcgtgaacatgcacagcccccaaggcaccagatagacattgatttccatctagaagtgtccgtcaaaccctcagcgatatatctctgccgcccaggctagagtgcagtggcacagtctcagctcactgcaacctccaccgcctggctcaagcgatcctcccacctcagcctcccaaggaactgggaccacaggcgcgcaccatcatgcttgcctaatttttgttttcgctttctgtagagatggggtttcaccatgttgcccaagctggtgtcaaactcccagattcaagtgatcctcccgcctcggcctcccatagtcctgggattacaggtgtgaggcatcgcgcccagcctctttggtggttttcaggaacagctagttagttattctgcagatggaggttcaggagcttgcaccacttcctagacccggctggaggagttgggtgtaattttcagccgggcgggtgcaagactcaaagagatgtgtggcagagagaagctgttcagacagcttctggggttgccaggaagaaacaagccacttgctccgatctgcacattccctccctgtccagggctgatttccacccaggcaggactcccgattcccagagaatctcaaagcaaggcattctcctggccgtgatccggctctcagctctaaagggactccatatctttactgcagacccaaatctgtgtcaccacagaggaaaaacggccgcttaattacacttgcatatatgctcgcaagaattcttccagggagcaggatctgggaacgtcctctggagacagggccttccaggagacgctgagctcggtgttggagcatggaggctgaatctaatccatcaacaggatgccacaggggagcagagaattccatttttttttttttgcttcaattcctttctatacaaccgtggttctcaaccaggggtccttctggtccccaggggatgctaggtggtgtctgggggcatttgtgactgttatgactcagggatgctcctggcgtggagtgggtggaggccagggatgctgatcagaaccttgcagtggccaggacaaccccaccccagagaacgacccagccctgaatgccaagggggagagactctgccttaattatttggaaaaatattgtatctgctccctgttgacaccagacactagaaaaaattcccgatggggtggatggcagaaaccaaggggggccccagctcctgcgattctcctcctctctccctccccactcagggtgtggattacaatgtgtgcagcctcctggaacctcaggaggacagaggatcatgagacacagagtttcttggggatctgtggaatcccctaacccccgggggtctcacctgggggtgattctgccccccatggggcactgggcaatgtctggggacatctttggttgtcacaactcggggtgtccctggcatagagtgggtggaggccagggacgctgctcagcaccctacagtgcccaggatggccccacctcagagaacgatctggccccaaggtccacagtgacagagagtgataaccgctgccataatctataggactgaccatagccacatgcatatggtcacacaaacatgagtgtgactgtccctctgactcaaaggacaaagccagtcccaacctttctaaccctgccacctgtgctgaccaccagtggcctctgtgtggatgttagttagggttcagcagccttaggaaaacagaacaccaggcatccagaccttccactgtggccctgagtggaagaggaggtggcggtggccgacgccaacactgtcacagcaagaaacaagagagtgggtgtgactgtggtcacttccatctcagggcacatgctacattgaggaagtaaaacctggggggagcgagatatacaagaagtgaaaggtgacttgtagaatgttctggaatcttccagaagcttctggaaacttccagaattttctgaaatatagtaggtattgtggcatagcaaggctttggattcagaagctgctgggcttgggcacggagtcaaaaaagtaacagaggaaaagccacggaatgcaaacttccagggatgacatggttgccacacagtgggcaggtgggtcacacccactgtacacaggtcacacttggctctttgaactcagtcacctattatgggtggaggaaccaaatcctgggatggggtaataaatgcatacggtttcagtttccccatccacaacacagggagaagaatcagataaggtgtccagtctcggagggtcctgggcagcaggcagcgcctccaagatcatcacctccaaccctgattctgccaagccccagcctggtaactacttctctcaaggggtcccagctctcagagctaggagtggccttcaacgccaggtctacaccccatgccaacagaatcccttccctgacctttgcaccagccaacccatcctccgtcatgcagccttcgacgatcggaaaccaacagcttctcatgacggtccctccgatttccagacaagcctgattcttaagccagcccagccaagctacagctcctatcccatctccccaagaacagacttcatcgttttctgaatttggtccacgcccatggtgtccgtgaggaaaaataacaacataagtaacatatagtacaatgctaattttttgagacgggatcttgctgttgcccaggctggaatgcagtggtgcaatcatagctcactgcagcctcaacttcctaggcttccaagcaatcctcctgcctcagcctcccaagcagctgggaccacaggtgtgcaccaccatatctggctaatttttaataaattttgtagagatagagtctcactatgttgctcaggctggtctcgaactccagggctcaagcaatcctcccacctaagcctcccaaagtgctggaattacaggtgtgagccaccacacccagccaatactaatatttatacataatatattgaataatattagcagtgattccagcaataacagtgataaccaggaccaccacccatccaggtcacagcctcgtagtccatcccaatcttttcaatgaccctagggagtgattcctatcctgtctgacacacaaggaaacagaaaggttccatgttttcttcaaaattcacacagaaagaaagtcacatggtggctaagtaggcattctaaatccaatgcctcaccatgcctacattccagaaaactctagaaggctctgggagtttctagaaggttccagaagattccagaaccctccatgattcgccacctttcactttttacatatcctattcccccaggtcccacttcctcaaagcaggacagaattttcaaccccttgcattcccatctgcatcttcaccttactcattgtattaactccaggcaccaggtagcaccttcctaaattacctgggcttggcaagacctaaatcaaagacatgacctgctcagtagtcccagatgtgaagaaactcaaaatccaatgccagaatcccttaaaacagaaccagtcagtgtccacagctctattaggcttgacccacagtggagaaagatgagaaacccacagggagaaaaacaggaccgtcttcttacagtctaagactgtcagccaggcacggcagctcacgcctgtaaccccagcatcttgggagaccgaggagggaggatcgcttaagcccaggagttcgagcagcctgggcatcatagtaagaccttgtctctttttttttttttttttttttgagacagagtctcgctctgttgcccaggctggagtgcagttgtgcgatctcggctcaccacaacctccacctcccaggttcaagtgattctctctgccttagcctccccgagtaactgggataacaggcacccgccaccatgcctggccaattttagtatttttagtagagatgtggtttcaccatcttggccaggctggtctcaaactcctgacctcaggtgatccacccgcctcggtctcccaaagtgctgggattacaggcatgagccaccttgcccagccacctgtctctattttttaaaaaattaaaacattttaaaattaaaaattaaaagctctgaaaagtgaccacatagactaacagtgggttttttagtaaaatacacttaacacaaaatttacaatttttttttttttttttttttgagatggagtttccctcttgttgcccaggctggaatgcaatggtgagatctcagcccactgcaacctccgcctcctgggttcaagagattctcctgcctcagcctcctaagtagctaggattacaggcatgcatcaccacgcctggctaattttgtattttagtagaggcggggtttctccatgttggtcaggctggtcttgaactcccgacttcattcgtttcttttttgagacagggtcttgctctgttgctcaggctggagtgcggtggtgtgatcacagctcactgcaaccttcgtctcccgagctcgcatgagggtccccatgtcctacctccccgtgagcccttgtgattgtttgttgttctggttttttaattctagccatcttactgggcgtgaagtggtatctcaccatggctctgatttgcatttccctgaggactgacgcggagcatgttttgaagtgaaaccgacagtttttgtttctttgatcctcctgtgtaaccctcccaagtagctgggactacaggtgtgccccagcaggcctggctaatttttatttttattttttttgtagcaaccaactttttttattttattgtttttgagacggagtcttgctctgttgcccaggctggaatgcagtggcacgatctcggctcactgcaacctccacctcccaggttcaagcgattctcctgcctcagcctcccgagtagctgggactacaggcgcccgccaccacgcccggctaattttttgtccttttagtagagatggggtttcaccatattagtcaggatggcttcgatctcctgacctcatgatccgcccgcctcggcctcccaaagtgctgggattgcaggcgtgagcaacctcacccagccggtctccaactcttggactcaagtgatcctcccacctcggcctcccaaagcgctgggatcactagcattagccacatcaccgggccagatccttcttgcgcagtgtttgtgtggacatacgctttcacttcccttaggtgtacgtctaggagtcaactcacagggtcatatggaaacactgtatgtaaccacttcaggaactgccaggctgtttccagagcagctgtaccacatgatgttcccagcagcgacgcatgaggatccccgtgtctctacctccccgtgagcccttgtgattgtttgttgttttggtttttttaattctagccatcctactgggtgtgaagtggtatctcaccatggctttgatttgcatttccctgaggactgatgcggagcatgttttcaagtgaaactgatagtttctgtttctttgtttttgtttgagatggagtcttgctctgttgcccaggctggagtgcagtggcgcaatctcagctcactgcaacctccgcctcccaggttcaagggattctcctgcctcagcctcccaagtagctgggattacaggcgcgcgccaccacgcccggctaattttgtatttttagcagagactgggtttcactatgttggccaggctggtcttgaactcctcacctcaggtgatccacccaccttggcctcccaaagtgctgtgattacaggcgtgagccaccgcgcccggcctgaagctgatagtttttaacatgaggggtcctggtataatcaactccacagctagaaggaagccggagttttacctggaaaaatgtgcaaggaaacgtggctggttccatcacggagatgaaagagtttgtgcaaaatgcagacagagccatctcataaaagagctacagggcgagctgggcacggaggctcacacctgtcatcccagcatttcgggaggccaaggcgggcggatcacgaggtcaggagttcgagaccagcctggccaacatagcgaaaccccgtctctactagaaatacaaaaattggccaggcgtggtggcacgcacctgtagtcccagctactcaggaggctgaggcaggagaatcacttgaacccgggagacggaggttgcagagatcacaccactgcactccagcctgggcaacagggcgagactccatctcaaaaaaaaaaaaaaaaaaaaaaaaagaagagctacagggaggcaggggtcatccctgcccctgctcccaccccatccggtgaagtctcccactccacgccatgagccttggtttcctcatctgaagacagagcctcagaagagctgccaggggttgctctgggggtaactgcaatgctggggtgaggggcaatcggaaacctgcagctgcaactgtaggagtgagggaggcattcaaataacagtctactgcattctagaagattccatcctgggctcactgaataaggactcccggcaggacacggtggctcacgcctgtaatcccagcactttgggagtccgaggcgggcagatcacgaggtcaggagatcgagaccagcctggccaacgtggtgaaaccccatctctttaaattttgtaaaaatacaaaaattagctgggcgtgctggcgcatgcctgtaatcccagctactcgggacgctgaggcacgagaatcgcttgaacccgggaggcagaggttgcagtgagccgagattgtgccactgcactccagcctgggcgacagagaaagactccgtctcaaaaaaaaaaaatagagatgggttctcactatgttgccctaggccagcctgggtgggaggccaggctggtctcgaactcctgacctcaggtgatgtgcctgcctcggctcccaaaatgctgggattacaggtgtgagccaccactcccggccaagacccgcatctctaatttttttaaaaagactattttccccggaatacctgctagatactctccacgccttctgtgtggtcttcttacctgctcttgaggtaggagcctcttctacagataaagccaacaaacaaaaacgatgctcaggccaaagaagaagatgcaggctctgataaagactggcagtggggaggcgggtgggagcccggaaacttcaaggtgtcactgaagcacaaggtgacatcagacagggagaagaaacaggggagctggagcaggcggagatggtgaaagcctgaaccgagggcattccaggtgaggagaaaaacaagagagagaccctggaggaggagggagggaaattaactgagctgtgaaaaacctgcctggggctgaccggctcttgcacagggacgggccagctcgggcagggacgggcttgctgccgggaggtacccgtgcagaaacaagaaaggagctcctgcaggggctggctagggagctggtggacagcatcggccagaggagctcaaatccgccctcagccccagggggccgagctgcaaaagcgacgtcaaatggacaaaaatcccaccgggcacagaagtgcgaccagcaagtctatgggtttaaaaataaatgatggggccgggcgcggtggctcacgcctgtaatcgcagcacttggagaggctgaagccaggtggctcacttgaggtcaggagttcgagaccagcctggccatttttttttttttttttttgagatggagtctcactctgtcgcccaggctggagtgcaatggtgcgatctcggctcactgcaagctcctcctcctgggttcaagcaattctcctgcctcagcctcgcgagtagctgggattacaggggtccgccaccacgcccggataatttttgtatttttagtagagacggggtttcaccatgttggccaggatggtctcgatctcttgacctcgtgatccgcctgcctcaggctcccaaagtgctgggatgacaggcgtgagccaccgtgcccggcccgcaccagtgctgttgatggaggccccaaagtggtagcgacacaagtgaccctggacggatgcacggatcaacgtagcgtggtccatacacaccccggagtatgattcagccttcaacagcaggcaatcctgacacaggccacgatgaggatgcactttgaggacctcagtctcagtgagagaagccaggcacagaaggacacatcctccgtgatccactcctaagaggttcccagagccctcagattcacagagacggaaagtaggatgggggccgggcacagtggctcatgcctgtaatcccagcactttgggaggccgaggcgggtggatcacctgaggtcaggagttcacgaccagcctggccaacatggaaaaacctcgtctctactaaaaatacaaaaattggacgggcgcagtggctcacgcctgtaatcccaacactctgggaggccgaggcgggtggatcacctgaggtcaggagttcaacaccagcctggccaacatggagaaaccttgtctctactaaaaatacaaaaattagacaggcgtggcggcacacgcctgtaatcccagctactcaggaggctgacgcaggagaatcgcttgaacccaggaggcagaggttgcagtgagccaagatcgcacgactgcactccagcctgggtgacaagagcgagactctgtctaaaaaaaaaaaagaaagaaaaaagaaaataaagtaggatgggagtgccaggggctggggagggggctggggagtctgtgcttcatgaggacacagtttcagtttgggaagatgagaaagttctggaggggacagtggttggttaaatgtacccaaaaaatggttaaacggggaaattttatgttacatgtaatttaccacaatgaaaaatgaagagaaggctgggtgcagtgggtcacacctgtaatctcagcactttgggaggccgaggctgaaggatagcttgagcctaggggttggagaccagcctggccaatatagcaagaccccatctctacaaaaaaatttaaaaatcagccgggcgtggtggcatgcacctgtggtcccagctacttgggaggttgagacaggaggatggctggaacccaggaggcagaggctgcagggagctgtgatcgcaccactgcactccagcctgggtgacagagggagaccctgtctcaaagtaaagtaagggaagcaaaacaaaagaaagtgagagaggggaagcagctgagagtcagagacgggggacagggtgggaagtcacgaggccccgtccactgtgtgtcaaacgtcggatgcccagtaacgtccgtgaccgcccggtgtcctcctcccgagacgagggcctggtgggcaggggacggccttgaacacccagcgacaccctgccgttgtttgcccagtgaaaagaggccactaagaaaagggccttggcaaaacaaagggccccattcactgtccccgcgagaggaggcctgagctctttctcgccagagctctcctgtcccggcccagtttcactttccaaggacactccaaccccacctcagcccccaccgatatcctgctttccaacaatcctctgcctttaccagacacttcatcagagcgagaatgtggacccaggggtgtcatcttggtcccagaggccagggggcagaaagtgccagctgtcaggcagtttcccagccgtgtgtggtctctgtctcagcatttttttttttttttgagacagagtctcacgctgtcgcccaggctggagtgcagtggtgcgatctcagctcactgcaacctccgccacccgcgttcaagcgattctcctgcctcagcctcccgagtagctgggattacaggcacccgccaccacgcctggctaattcttgtatttttagtagagacggggtttcaccacattggccaggctggtctccaactactggcctcaggtgatccacccacctcggcctcccaaagtgctgggattataggcgtgagccaccgtacccggcctcccccctcctttttaaaaatgttgcatctcaggcaaagctgcgctcaacaccccggcccggtgcctgcttgcttcagtctccagcactgggatcccggccaatccccgcaacacattcgggaccggcaggacgcatatgtctccaatcagaagggagatgtctctcctgagctctcttcagtgtttgccgccaagatggggaagacgacgagtttccaacaccctgaaacgatcccaaggagcggagcctttgtagggtggggtcaaaagagactttacttactttttttctttcttttttttttttttttgagacagagtctcgctctctcgcccagggtggagtacagtggcacgatctcggctcactgcaagctctgcctcccaggttcacaccattcccctgcctcagcctcctgagtagctgggactacaggcgcccgccaccacatccagctaactttttgtattttttagtagagacggggtttcaccgtgttagccaggatggtctcgatctcctgacctcgtgatccgcccgcctcggcctcccaaagtgctgggattacaggcgtgagccaccgcgcctggccactttttttcttttttttttttttgagacaaggtctggctctgtcacccacactggagtgcaggggcatgatcttggctcactgcagcctcaacttcctgggctcaagcgaccctcctgcctcggactcccgagtagctgggattacaggcatgcgccactatactcagttaatttttttctcttttttgtagagatggtgtcttactatgttgtccaggctggtctcaagctcctgggctcaagcaatcctctcatcttggcctcccaaagtgctggggttaggctgggcatggtggctcacacctgtaatgccagcactttgggaggccgaggcgggtggatcacctgaggtcaggagttcgagaccagcctggccaacatggagaaaccctgcctctactaaaaatacaaaattagccaggcatggtggcccatgcctgtaatcccagctagttgggaggttgaggtaggagaatcgcttgagcccgggaggcagaggttgcggtgagccgagatcgcaccattgcactccagcctgggcaacaagagtgaaactccatctcaaaaaacaaacaaacaaaaaaaagtgctggcatgacaggagtaagccaccagcctggccaagaagtttaaatcatgatgccgggcgcggtggctcacgcctgtaattccagcactttgggaggccgaggcaggcagatcacatggtcaggagttcgagaccagcctggccaacacggcgaaaccccatctctactaaaaatacaaaaaattagccgggcaaggtggcacgcacctgtaatcccaactatttgggaggctgaggcaggagaatcagttgaacctgagtgagctgagatcgtgccactgtactccaacctgggcaacaagaacaaaactctgcctccagataaaatagccgggcgcggtggctcacgcctgtaatcccagcactttgggaggccgagctgggcagatcacaaggtcaggagatcgagactatcctggctaacacggtgaaaccccgtccctactaaaaataacaaaaaattagccgggcatggtggcgggtgcctgtagtcccagttactcgggaggctgaggcaggagaatggtgtaaacccaggaggtggagcttgcagtgagccaagatcgcgccactgcactccagcctgggcgacagagcgagactccgtctcaacaaaagaaaaaagaaatcatgatgcaaagatgaaaagcaaagtttgccgtacgaaggatggagtcggtgtcagtgctctggggaagtggggagttccctcagcaagaatgacctcagagtagctggtaggtgggctaaggccacctgggctgggagaaccaggttaacagcaccagtaggaagtcaccagggtctcaaggatccccagcagggagagagcaacagggcacctcacccctacgtgttctttcccgaaacccgtaaccccggtctgatcacgagagaaatatctgacaaacctagatcagaagtaagtctgcacaatacccagccggtccccctaagaccgtccaggtcacgagaggtaacgaacatctaagacatggtcccaacctggaagaacccccggagacgagccggctaaatgtcacgtgggattctagatgggtcctggggcaggaaaggacattaggggaagattaatgacatttgaataaagtgtggagttgagagaaatgaacccattgttagccgggcacagtggctcccgtctgtcctcctaacactttgggagtccggggtggcaggatcacttgtgttcaggagttcgagaccagcctaggcaaaatagcgagacctcatctctacaataaaacaaaaattagccaggcacggggttgcgtgcctgtggtcccagctactcaggaggctgaggtgggaggatcgcttgagcccaggagttggaggctacagtgagccatgatcactccactgcacttagcctgggcgacagagtaagactctgtctcaaaaaaaaatgtaaatgtaaatttaaaaaatattacttttaatggcaaagaccacaattatgtttgccccaacataataaatacatacaataaataaataaataagaaaaaaataaacaaaaataaaaataatgcaaaaaaaaagggggaaaaaaatgccaatcatactatgcatggcaccgtgttataggggaaaaaaaataattatataaaattgttcccaaatcattaagcccttctcattatggaggctacaggaataaacgctcctaacaagaccacatttgggccgggctcggtgggcctcccagcactttgggaggccaaggcgggtggatcacctgaggtcagaagttcgagaccagcctggccatcatggtgaaaccccgtctctactaaaaatacaaaaaatagccgggtgtggtggtggacgcctgtaatcccagctactcaggaggctaaggcaggaggatcacttgaacctgggaggcggaggctgcagtgagctgagatggcgccattgcactccagcctgggctacagagtgagactccaactcaaaaaaaaaaaaaaaaaaaaaaaaaaaccatattcgatgcaattctctgaagttaactgttagagctctgacaacacagaggctgaaatgacatgacaaatgctaaagtacaaagttccaagatcaagtcccagcatgaccactaactcgtgaaacctccagacctcagttttcccatgcataaagcgtgcgagatggactcgagggccaacacgctttttcggtaagagtccagatacccagtgttttcagccttgcggtggagccactctctacggcaacgacttaactacaccatggtagcagaatacacagagcagtgtgccaataaaacattatttctggacactaaaatctgaatgccatataattgtcatgtgtcatggccttttctttgacttttgttttttgcttcttttggcggcgggtagaagcagggcttcctttgacttttttttccaaccatttaaaaatggaggccgggcacggtggctcacgtctgtaatcccagcactttgggaggccgaagcgaaaggatcacttgaggtcaggagttcgagaccagcctggccaacatggtgaaaccccatctctactaaaaatacaaaaattagccgagtgtggtgtcaggcgcttgtaatcccagctacccgggaggctgaggcaggagaatggcctgaaccgggaggcagagtttgcagtgagccgagatcacaccactgcactccaacctaggtgacagaacgagattctgtctcaaaaaataaaataaaataaaaataaaaatgggataatcattcttagcccaggggccatatataaaaccaggctgtgggccagaggtggcccaagggcggtggttactgactcctggactggacgtgctccaagccccttcctcagctgcctttctaagattctctgattacaaatccatgtgagtttttctatttcaacctgttggctcaggtctttttttttttcttcttgagacagggtcttgctctgtcgcccaggctggagtgcagtggcacaatcttggctcactgcagcctccacctcccagattcaagcaatactcccacctcagcctcctgagtatctggggttacaggcacgcaccaccacgcccaactaagctttgtattgttaataaagacggggtttcaccatgttggccaggctggtctcgaacttctgacctcaagttatccacccacctcagactcccaaactgctgggattacaggtgcgagccaccgcgcccggccagggcagtgaaactataggataccacaatggtggacacgtatccttacacccttctccaaacccgtagaatcttcaacaccaagagtaaactccaatagagactggggactctgggtgacaatgatgtgtcaacgtgggttcatccattgtgattataacgaatgtaccactgtggtacggggtgctggtaatgggggaggctgtgcctgtgggttgcagggaggtgtatgggaactttctgttcttaccgctcgattttgctgtaaacctaaaatagctctaaaaaaataaagtctatttaaaaacccaactgtatctttgtactttaatgcaataaaagaatcataaaatcattagaaatggtttcggcctggctcagtaacgcatatccgtaatcccagcactttgggaggacgggaccagaggattgcttgagctcaggagtttgagaccaacctgggcaacatggcgagaccccatctctactaaaaatggaaaaattagccagtcgtggtgttacatgcttatagtcccagctactcaggaggctgaggtgggagaatcacttgagcctgggaggcggaggttgcagtgaaccaagattgcatcactacactccggcctgggcaacagagcaagactctgtctcaaaaaaaataaaaattaaaaaaataataataaaaggaaaagagccgggcgtggtggctcacgcctgtaatcccagcactttgggaagccgaggtggaaggatcacctgaggtcaggagttcgagaccagcctggccaacatggtgaaaccccgtttctactaaaaataccaaaattagctgggcgtggtggcacacgcctgtaatcccagctactcgggaggctgaggcaggagaattgcttgaacccgggaggcggaggttgcagtgagctgagatcatgccaccgcactccagcctgggcagcagagcaagattgcatctcaaaaaaaaaaaaaaaaagaggagggaaatttccacggacacccggggagaaggccttttgtgatgacagaggcagaaattggatcaatgaggccataagccaaggactcctggagcccccagggggtgggggaggcagtacgcctccttccctggagcctctagaaggagcgcagccctgctcacaccgtgacttcagactcctggtctccagaaccatgagacaatacatttctgttattttaccacccggtctgtggtcattcatgacggcggcagccccaggctcctcctacaactgggtactgccaaggccagcgaagtccaggccttactttccgaccacattgaagccacagccgtctctgtgcccagcagactctgccaggacatctgcatttgaacttggctggattcacctcttttctttgattcctcctggctttgttgtccatcaagttagggagttttttaagaaggccaggggaggccgggcgcggtggctcacgcctgtaatcccagcactttgggaggccgaggtaggcagatcatgaggtcaggagatcgagaccatcctggctaacacggtgaaaccccatctctactaaaaatacaaaaaatcagccgggtgtggtggcgggcgtctgtagtcccagctactcgggaggctgaggcaggagaatggcgtgaacccgggaggtggagcttgcagtgagccgagatcgcgccactgcactccagcctgggcgacagagtgagactccatctcgaaaaaaaaaaaaaagaaggccaggggcagcagtcttgggcttgtcaacaaaggtcaaatgaacaatgaagtccgacgtggtggctcacacctgtaattctagaatgtgggccggctgcggtgggcgaatcacttgagcccaggagttcaagaccagcctggacaacacagcaagacccggtctctacaaaagatacaaaaattagccaggtgtggtggtacatgcttgtggtcttggccatctgggaggctgaggcaggaggatcacttgaacctgggagttcaaggctgcagtgagctgcgattgtgccactgcactccagcctgggtaacggagtaagcccctatctcattaaaaagaaaagtagatgttcagccaggcacagtggttcatgtctgtaatcccaacactttgggagtctgaagtgggtggatcacttgagctcaggggttcaagaccagcctgggcaacatagtgagactccatctctacaaaaaattagccggatatggtgacatgtgcctgtagtcccagctactctggaggctgaggcaggaggatcgcttgagcccaggagtttgagaccagtctaggcaacatagcaatatcctatctttacaaaaaaaaaaaattagctgggcatagtgatctctgcctgtattcccagctactcaggaggtcgaggtgggaggattgcttgagccagggaggtggaggttgcagtgagccaagatcacaccactgtactccagcctgggtgacagagcgagactctgcctcaaaaaaaaaaaaaaagaaagaaagaaaaaaagaaagaaaagaaaagcagactttcaactaattaacatacatcaaaggtagtctttttctactttaccatcttccaaagagtaactgtacagaaactccaaaaaggtagccatttctgcaaaccagggtctctcccctgggcactgtggacatcggagctctggactattctctggggtgcggccatcctgggcactgcagggcgctgagcagtgtccatggcatccacccactccatgccaggagcagccccggttgtgacagccacaaatgtccccagacgttgctcagtgtcccctgaaggccagaatcacccccagggacaagctctgatttagggcatggctggacatgagacagagacagcaccagataaatgcgtcaagggttaaagaatgaacgcccacattctacccacaacccccccaagtctctaatcaaatgccgcctcctcttggaggctctcagaggtcgaggtccctgtcttcattttgtaaacccatcactcgacacaatatcagacacttaatattgtgttgtgaacgttaataaatgtctgtaaaataaatgactctgaccttgaaacggcaatgtctctatgcctaagaaatcttggttgtttgaggataaaattatcttcctttctctctctggggttgggctacatttgagattgtaaggctgggtaagcacaggggatttgggtcagaaatgtcaaggctatctggaattggtgacactatttttggaggaatctacattttggggagatttttttgttgcttttttttgggggggggcagggaatagcacttaactagttcaaccatagtttttaggggaaaaaaaaaagttttagttgaaaggatctgttctaccatagcctggtatagagcagtggttctcaaccccagatgactgtggacaatgtctggggacatcggtggctgtcacaactcagagatgctcctggcgtggagtgggtggagcccagagacgctgctcagcaccctgcagtgcccaggacggccccaccccagagaacaatccggtcccccctatctgcagtactaagagggagcccctacattatttgggaaaaaaatcaagtctgcttcctgatcacactagacaccagaataaactcccaatggggcagacagtgtaaatcagggggacccccagcttctggggctcacctcctctctccctccccactcagggtgtggatttcaatgtgtgcagcctcctgggacctcagcagggcagaggatcatgggacgcggagtctcttggagtccgtggactcccctagcccaggtgtgatctgctccctgagggacactgggctatgtctggggacatctgtggttgtcacaactggaggtgctcctggcgtggagtgggtggaggccagggacgctgctcggcacctcaggacctgcagtgcccaggacagccctgccccagaaaatgaccctactcaggccatcacagggtagggttgaactcgagctcaggagttcgagaccagcctaggcaatacagggggacctccacgtttacaaaaaaaagttttaattagctgggcatggtggcgtgcatctgtagtcccagctactctgggaggctgaggtgggaggattgcttgagcccggagtttgaggctgcagtgagccaggctgagaaaatgtgtggtgagtggcatggggagacctagcgccctctgtgtacccaccaagatgggccagtctccaccaatccgttccctggcaaacttgtattctactcaaagcttcctcgtggcctcctgtctggaccttccgcagccccctctctacccccctggacgacttcttatcacccctgcacctattcagctcctagaacacacaggcccgaggcccccacctctgtgccaccctgggctcaggcccctctgacccagactgccatctccacggcccccacaccagcacacagatgcctcattcacgtggtgctcccagggcctggcaccagttctgaggcttaaaataggcacacaacgggcctttgtcggatagaggaaggaaggaaggagcgtttcagacaaaggagacagcaacagcagcgtccaggaaacccaggggcaccggggaggtggatggagccaagtgggggtggggtacttgaagggtcagagggcagggccaggccatgcaggaccctgaagaccccatgaggaactggggtgccatcatgtgggtgctgacttgataggaggcagggaagtgaccgtctgatcagtgcccaggaagcttactaggaaggtcctgctggagctggagaaaccagaggctgattcgtcacctcggagtctcccgccagggatgatgaggctctcggctcaagagggagcactgagatgggaaagaaagcagacagaaggggccgggcatgggggctcacgcctgtaatcccagcactttgggaggccgaggcgggcagatcacctgaggtcaggagttcgagaccagcctgggcaacatggtgaaaccctgtttctactaaacataaaaattatctgggtgtggtggtgcatgcctgtaatcccagctactcgggaggctgaggcaggagaatcactggaacctgggaggtggaggttgcagtgagccgagattgcaccactgcactccagcccgggagacagagcaagactccgtcaaaaaaaaagaaaagagagaaagagagagaggagagagaggggagagaggggagagagggaagagaggagagagaggagagagagaaagaaaaagaaaaaagaaagaaagagaaggagagaaagaaaaagagagagagagaaagaaagaaagaaagaaagaaagaaagaaagaaagaaagaaagaaagaaagaaaagaaagaaaagaaagaaagaaaggaaaggaagggaagaaagaaaggaaagacgaaggaagaaggaaggaaggaaggaaagaaagaaagaaagagaaagaaagaaccactaaacaaacatcccaagcttcagtgcagtggactgcctgtgcccaggaaaaagccatttacatcccagcactgtgctccattgcccaaaggcaaaagcggccgagcgtgtgttgctgaatggatggatgagcacagcccggcctgtccacgcaccggaacacgactcagccctgaaaagggtcgaggctctgacgcaggccacagcacggatgcaccttgagcatgtcacacgcagtgagagacaccagacacaaaaggccacacagtgtgtgacccatttctttgaaatgtctaggacaggccagtccagagacaggagggagaggcgtgggtgccagggctgggggagggggtggagagtccccctcatggggacaaaagattttactaggtgatggaatgtttttttgtttgtttgttttttgagacagagtctcgctctgttgcccaggctggagtgcagtgctcaccgcaacctccgcctcccaggttcaagcgattctcctgcctcagcctcctgagtagctgggattacaggcgcccggctaatttttgtatttttactagcgacagggtttcgccatgttggccagactggtctcgaactcctgacctcaactgatccacctgcttcggcctcccaaaatgctgggatcacaggaatgttctgaaaggggcttatagggatgtttgcacagctgataaacttatttaaaagatggaattgcatccttaaaaggtctgaatgttatgaagtgtaaattatacctcaatttttgtcataaaaagcagtaagacttttccttttgcgaggttcaagtaactgttcgtggaagcgtctcggagctgcccacgaaccccaccgcccatccgtgtcaggagccgatgtgggggagcaaccacacagagagagcgtggcccactcacgccgcaggatgggggaggaggaggacaggagtgacccctcgggggccgctgtgtgactgaggatgggtcagcccatctccttagctctcacactcatcggtagggtctcctgggtgacgtaaaccatgaacacttttctctaacccttaagagacagaggccaggccaaagagtgcatgtataaaaagcagtgacaagtgaagtcaagaaatgtcaacgagcggggagaggcgcccgacatcaacaaggacgcagaattgcagaaatcagccgtgaaaggacacagcggccgggcgcggtggctcacgcctgtcaccccagcactttgggaggctgaggtgggtggatgacctaaggtcaggagttcgaggccagcctggccaacatggtgagggccccgtccccccccccgcccgtctctactaaaaatacaaaaattagccgggcgtggtggcacatgcctgtaatggaagctactcgggaggctggggcaggagaatcgcttgaacccgggaggcggaggttgcaatgagacaagatggcgccactgcactccagcctgggcaatgaacgagaccacatctcaaaaacaaaagacaggccgggtgcgggggctcatgcttataatcccagcactttgggaggtcgaggcaggtggatcaccagaggtcaggagttccagaccagcctggctaacatggtgaaactccgtctctactaaaaatacaaaaattagctgggtgtggtggtgggtgcctgtagtcccagctactcgggaggctgaggcaggagaatggcttgaacccaggaggcagaggttgcagtgagccgagatcgcaccactgtactccagcccgggcaacggaatgagaccatgtctcaaaaaaaaaaggacaggccgggcgcggtggctcacgcctgtaatcccaacactttgggaggccgaggtaggtggatcacctgaggtcaggagtttgagaccagcctgggcaatatggtgaaaccccgtctctactaaaaatataaaaattagccgggtgcagtggtgtacgcccataatcccagctactcgagaggatgaggcagaagaattgcttgagccctggaggcggaggttgcagtgagccaagattgcaccattgcactccagccttggtgacagagaaagactgtgtttcaaaaaagaaaaaaaaaagaaagaaaagaaaaaaagaaagcaccagctcccaagcctatagagaccaggcacgaccttcctgtaagaaaccatgaagcatcttcaaaaatacaaatgactctggatacgattttaaagaccatcgctgcttccagatggaactgaaaaaatccgaataacaccttgaatgaagaaaggagtgttttccactactatcggtgaacaagaaaaatgcctccattcagtaaacacgaagctgaattgtctacacgtgagggtaatttgtgtttagttctctttgccttcaaacagtggggccccagggtttacgaagcatgaaacaagaacagaaaataacggtatcggtcaaaggatgttttctaaataaagctcctctgtaagatcgagacgcacctgcagaatttgagcttcgttggaagcttcacgttccaggttaaaaccaagaaagcacattgcaaacattgtcatcttccaatgcttgcaactgacaacttcaggccatcttctaaatcagtactaagtgttcaaaagccacataaaaggcccacctagaaaggagtagcctttttttttttttttttttgagacagagtctcactctgtggcccaggctggagtgcagtggtgcaatctcagctcactgcaacctctgcctcctgggttcaggtgattctcctgcctcagccccccaagtagctgggattacaggcgtgtgctaccacgcccagttagtttttgtatttttagtacagatggggtttcaccatgttggccaggatggtcttgaattcctgacctcaagtgatccacccacttcggcctcccaaagtgctgagattacaggcgtgagccaccgcacccagccataagtaggcatttctaatgttttctaaaagcagtgagaccttacttctcccctctccgaatgacagcactaaatgacttaaaagcaatcctcaattctgaatgaccccacttcctgcacatcaaaggggagatgaggtcgttaaaggagaaaataaatcagttttgtctataacaagggttccacactggagtatctctgtccctacaggacgctgggtgatatccggagacatctgtggttgtcacaatgcggggagctcctggtgtggagtgggtggaggtcagggatgctgctcggcaccctgcagtgcccagaaggccccaccccagaggacaatcagatcccaaatgtccgcagcgctgggatagagagacccagacgcaccccatgaactgaagttgtaaactcaaaatttcaagcgtataatcacagctcgatgtggttccttacggggtgcccctaatcagaatgacccaggcagccttctcttgaacaggtgcatctgttacttaacgagctttgagactctcctgccaccaggtgtgggcaaagtcttctttcttttcagttttttactcacttttaataatatggaaacaggctccatatttgagactctgtctcaacataataataataataacaataataataagacatatttttgttgttgttgcagtcctttttttttttttcctttatttttttgaggcagagtctctctctgttgcccaggctggagtgcaatggcgtgatcttggctcactgcaacctccacctcctgggttcaagcgattctcctgcttcagcctcccaagtagctgggattacaggcaaacgccactatgcccagctaatttttgatatttttagtagagacaggttttcgctatattggccaggctggtctcaaactcctgacctcaggtgatccacccgcctcggcctcccaaagcgcggggattacaggcatgagccaccacaaccagccatgcaggttattttttaaagcttctgggggtgaccctgatgtgtgctcctaaggttgcaggactagagtcaagttccagtcacttcctttcctctcctctgtgacaacccagtcatcccactcctccatctccaaacccaccaaagaaaaaaactggattgagtccattattctccatgcttcaggtaccctcactatatgctaggaaatagtccatgcatacatcccgtaattcgaccctgagaggcacatgctactgtttttattattcccgctttgcaggggagtaaacaacacctccaaaagatgatacagccaaatccgcagcgagaggctgggtcggaacacacacaggcgcacctcccagaggcccccgacactccatcaaggcaagatcgcagcatcccacgacgggaacaagtttgtgaacttggcatttgcctcgctgacacctagcaaccgtgtgaagacgcttagctggggatccgctgcctctgttcatcaagcctgtcttccaccgcccacctcccaacccctagcaacccccgctccccaggaaaaataaagtgccacccacgtcgctcaatagcaccgtcccaaaaactcccactttagttcctgaaaaattcagtcaccgacaggagcctttctccttcctgaagcgttctccttggcaccctatatcctagaaataaacctcaaaaagtattccgaactcccgtctccttcaactcactgttccccagggggttctgccccgtgcccagttctagagcaaacaattaacatctcccccaaaagtagaggggtgagtcctctccaaattccttttaactggatcctacctgagacacctccccacaccccgttttcctcctgattagtcaatgtctagcaaaacacctgcccccaggtgtctccagcctgggaccttacccccacctcccttctcactaactcaccccaacttccttctccctgaacccccttccaccccacacactcacaagctccccatttcccctgatagcccccagaccctttctggaacaagcctgacccccacctgtatgctccagccactccctggctcaccccagctttgtccttctgccccttttcagctaaccctaacccctgggccgtcaatcacacccccccatcttcaccaaccccattcctcagtcctctccccagacaacctcaacatctaattccctctgcagccccctctccaatgaaccccacttcaaactccatccccagccccctctccagctccctgcaaacctcaaccccactcccagctccctcttcaaagaagctgcacccttgactcaacccctgttccccgctccaattaacctcaacccccaacaccatccccagcgtcctccccagctaactcagatttccaattccacttccagccccctccccagctaacctcgacctacaattccagccccctccccagctagcttggacctccaatcccactccaagccccctcggcagctaacctcgacctgcgactctagccccctccccagcaaactcaagacctccaattccaccaccagccccttcctagctaacctggacctgcaattccagacccctccccagccaactcagacctccaatcccgctccaagctccctccccagctaacctcgacctgcaactccagtcccctccccagataactcagacctccagtctcacccccagccccctcctcagctaactcagacctccaatcccacctccagccccctccccagctaacctggacctgcaactccagcctcctccccagctggccctgatttctaagtggagtcccaatgcccagacccaatccttccccagctaacctcgatctgcaccccctgccccgtccccagctaacctcgacctgcaactcccgccccctccccagctagccctgagccccaagtgcagtcccaatccccaaccccagcccctccccagctaacttcgaccccctaagcgcagccccgtccccaattccaaccccagcctccagttgcagcccgggtccccagacccagcccccctcctcagccgactccgacccccaactcggtccgcagccgaatccgagctgtcccagtcccctctccgggacgccggccgcgccctcacttcccctggcccggttcgcgggcgcccttacctgcgctcgggccccgcggccgcctcagccccgccgcgcagccgaaccctccgccccggcccgcgagcgctcgctcccctctgcgggggcggggccgacactcggggggcgggccctggcgtcccggcaaggccaatcgcgagccccggctgcgggaggccggagcgggggcggggcgcggggcaggcagcggggtaggctgcgcccaggagagtggggcggggctccgggcgcgggcggggccgggggcggggcgaagagcggctttccagggtgacttcgtgacgtcaggaaggcgcgagtagtttcgcgagttcgaatcccgcgctaggtgagctggttcgaatcctgcatgccagctccgggggctcatttgctggggaagaatgtcagtgatcataactgctgcaccgctttcttgaagactttataggctccctctcgtgggaccctccgcataaggccagaaggcgagattactatccacattttacagaggtggaaactgggtctcagaaaggtgaaacctaaggtcatttgcccaagcctgtctcatcatttccaagatttctcagtttcctaactcatggccctggatccacaaattcctgagccccaacacagatggaatgaaccagaatcctatagggaactggaccctgaaatctgtgttttgtttagttttcgttttgtttttgagacagggtatcactcaattgccgtggctggactgcagtggtgcagtcatagctcactgcagctttgaagtcccaggctcaagcagtccttccacctcagccttccgggtagctggggccacaggcacgcaccaccacatccagctaatttttgtattattagtagagacagggtttcaccgttttggccaggctggtctccaactcctgacctcaggtgatccacctttcttggcctcccatagtgctgggattacaggcgtgagccaccgtgcctggccctggctaatttttttttgttagagatggggtcttgctatgttgcccaaactggtcttgaactcctgggctcaagtgattctcctgcctctgcctcccaaaatgcttggattacaggcctggaatcttcattttccacaagctcccttgggaatattggaaaacactttgtatgtctccaaaagcagtacacagccctggaaggaagatggagccaccatattctgtgacctcagggatttcatcaggcgctgacactgtgtgtccttgccgccccacctgagccctgggattggagctgctggccaaaatccaagataaacttccccagggttcctgtcatccctgcaagaacctccctgctcatcctctggactccagtggcctgccctgcagggcacagagaaacctccatctccctgcttgccctcctccaggctctccccagctggcatcccccaagaggaatgactgtctagatagagcttgggaagggcacggtggctcacgactgtattcccagcactttgggaggctgaagcgggaggatcgcttgagcccaggagttcaagaccagcctggcaacatactgagaccgcaactctacaaaaaaattaaaatattagccaggcctggcggcgcacaccagtagtcccagctacttcggaggcgaaagcaggaggatcgcttgagcttaggaggttgaggctgcagtgagctttgatcacaccactgcactccagcctgggcgatagagtgagactctgtctcaaaaaaaaaaaaaaaaagtgttaaatacacaatgcaatatgattcggccataacaaagaataaaaccctgtcatttgcagcaaaatggatgggactggaggtcattatattaagtgaaaaagtgaaataagccagacacaggaagacaaatagggcatgttgtcactgatacgtgggaaccagagagttgatctcatggaggtagagagtagaatgatcaataccagaggctggaaagttgtgtaggttgagtgggggggaaatgaaaagaggtgagttatgagtacaaacattcagttagacagaaggaatacattctaatgtttgatagcagaataggatgtattctgctatcaaatatagtattagaataaattctaatgtttgatagcagaatagggtgactgtagttagcaacaatgtattgtacatttcaaaatagttagaataatggtggcttacgcctctaatccaaacactttgggaagccaaggtaggagaatcccttgagggcaggagttcgagaccagcttgggcaacatagcgaggcttcatctctatttaattattattattattattattttcttttttgtgtgtgtgagatggaatttcgctcttgttgcccaggctggcatgcaatgacgtgacgtcagctcaccacaacctccgcctcccgggttcaagcgattctcctgcctcagcctcctgagtagctgggactacaggaacgtcccaccacgccaagcttattttttagtacagacggggtttcaccgtgttagccagaatgggctcgatctccggacctcgtgatctgcccatctcggcctcccaaagtgctgggattacaggcgcccacccggacacagtggctcacgcctgtaatcccagcactttgggaggccaaggcgggtggatcacctgaggtcaggagtttgagaccagcctgaccaacatggagaaaccccgtctctactgaaaatacaaaattagccgggtgtggtggcacatgcctgtaatcccagctactcgggaggctgaggcaggagaatggcttgaacccaggaggcagaggttgtggtgagccgaggtcgtgccattgcactccagcctgggcaacaagagcgaagttctgtctcaaaaaaaaaaaaaagctagaagagagtccttgaattgttcccaacatatagaaatgagaaatagtctaagttatgaacaccccaaatacccaaacatgatcattatatattttatgcatataacaaataccacatgtaccccatacatagatacaagtatttgtaacaattttgaaaaagtgtcatgtgaaaccatgttggagcctaagacaaatggaaaaggtggcatgtcccaatagacatattttcacatatattttcccatcaacttccctttggttttttgtttgtttgttgtttatttgttttttgtttgtttgttttgagatggagtctcactcttgtcgtcaaggctaaagtacagtgatgtgatctcggctcactgtaaactccatctcccaggttcaagctattctcctgccttagcctcccgagtagctgggcttacaggcgcccaccatcatgtccagctaacttttgtatttttaatagagacggagtttcaccatgttggccagcctggtctcaaactactgacctcaggtgatccaccaacctcggcctcccaaagtgctgggattacaggcatgagccattgcgcccggcccctttcttttgttttttgggtttttgttgttgttgatgatgatgttgtttggacacagggtcttgctctgtcgcccgggctggagtgcagtgattctatcacagctcactgcagccttgatctcccaggctcaagtaatcctcccacctcagcctcctgagaagctgggaccacagatgcatgccaccatgcctagctaatttttacattttttttttttagagatgggatcttgctatgttgcccaggctggtctcgaactcctgggctcaagtgatcctcccgcctctgccttgtttattttctttctttctttctttccttttatctgagacagggtctcactctctcatccagggttgagggcagtggctcgatcattgctcactgcagcctccaactcctgggctccagcgatcctcctgtctcggcctcctgagtagctgggactgcaggcacccattgggattacaggcttgaagccacctcacctggcccaattcccctttttcaaatttagcagtatccctggtcaaaaaaagaaacattaaaaattaaattaaaattgtaaatattgagatcactgtggattcatacgcagttgtaagacatagcatagaaggagggccagtaccctctgcccagcttcgcccaatggcaaactcttgcaaaactgcagtgaaatgtcatgaacgggatattaacattgttaagcttaagatagaggatgttggccaggcgcggtggctcacgcctgtaatcccagcactttgggaggccgaggcgggcggatcacaaggtcaggagatcgagaccagcctgaccaacatggagaaaccccgtctctactaaaaatacaaaattagccaggcgtggtggcgcatgcctgtaatcccagctactcaggaggctgaggcaggagaatcacctaaacctgggaggtggagattgcagtgagccgagatcgcatcattgtactgcagcctaggcaacaagagcaaaactccttctcaaaagaaagaaagaaacaaacaaacaaaaaaaggcagaggatgtttccatccctgcgaggatccctcctggtgccttctaagagccacacccaccttcctcccatccccaaaccccatccctaacctctgaccatcaccaatctcttcaccatttcacttatttttatcttttttttttttctgagacggagtctcaccctatcgcccaggctgaagtgcaatggcgtgatctaggctcactgcaacctccgcctcccaggttcaagctattctccagcctcagcctcctgagtagctgggattacaggcgcccaccacctggctaatttttgtattgttaatagagatggagtttcatcatgttggccagcctggtctcaaactcctgacctcaagtgctccacccgcctcagcctcccaaagtgctgggattacaggagtgagccaccgtgctaggcccctttttttttttttttgagacaaggtcttgctctgtctcccaggctggagtgcagtggcacattcacagcttacttgcagcctcaaactcctgggctcaagtgatcctcctgcctcagcctcccaagtagctgggactataagtgtgcaccaccatgtctggctagttattttgtatttttattttattttaagttctgggatacatgtgcaggctgtgcaggtttgttacataggtaaatgtgtgccatggtggtttgctgcacctatctacccatcatctatgttgttttgttttgatttgatttgtttgagacagagtctcactctgttgcccaggctggagtacagtggcgtgatctcggctcactgcagcgcctcacgggttccagcgattttcctgcctcagcctcccaagtagctgggattataggcgcctgccaccatgcctgactaatttttgtatttgtaatagaggcaaggtttcgccatgttggccaggctggtctcgaactcctgacctcaactgatttgccggccttggcctcccaaagtgctgggatgacaggcgtgagccaccttacctggccaacttttttcactttttataattatctgattcatctaggtggtggcttgtcttagtattttgttccttttgactgctaagtaatattccacaatgaggatggggcacaatttgttcaaccatccacccactgaaaaccagtgtttggctcttactaataaagctgccgttaacattcctgtaagggtttgtgtatgaacataaatcatttctctgagataaatgaccaggaccacaatcgctatgtcatatggtagctgcatgatttgttcttgaagaaactgccaaatattcttccagagagttatatattttttaatgttttcttttgagatagggtcttaccagtttgcccaggctggttttgaactcctgggctcaagtgatcctcctgccttagcctcccaaagtgctgggattacaggcatgagcctgtattttttaatggttactttttttccagaacactaaagcagttgaaagtattcaaggattgaaaagatgttgtattcaaactcacaatgtcatgtgtctttttacaatgttattattaagtttctttatgtccaaatagactttattataattttactgtcctagttttagtagaagcaaatcctactaaatcatcagtcatattttcaaaatctacttctggaaaaaatcaaccactaaaaatgcatacagatatataaaggtgctgggccgggcgcggtggctcacgccggtaatcccagcactttgggaggccaaggcaggtggatcacgagatcaagagatcgagaccagccttgccaacatggtgaaaccccatctctactaaaaatacaaaaattagctgggtgtggtggcacgcacctgtagtcccagctactcaggaggctgaggcaggagaatcgcttgaacccgggaggcggaggttgcagtgagccgagacgtgccactgcactccagcctggcaacacagcaagactccatctcaaaaaaaacaaaaagaaaagaaaagaaaaaagaaaattagatgggcacagtggcacacacctgtagtcccagctactctggaggatgaggcaggagaatcgcttgaactggaaaggaggaggttgcagtgagccgagactgcaccactgcactccagcctggacaacaaattgagacagtctcaaaaaaatagaaagatatgtaaagatgcttaaatatttggtatatgtacacatgcacacatttttccttttgcctgaggctctcaggggaaggttggatgctgtctttatttgggactttaaaattttgttcaatgcagattttttgtactcatgtcaatttttaaaaaaatattgcattaggaccaggtgcagtggctcatgcctgtaatcctagcactttgaaaggccaagatgggaggattgcttgaggctaggagttcaagaccagactggccaacatagtgagacccccatctctactaataatacaaaaaataaaaattagctgggccgtggtggtgcatgcctataatcccggctactcgggaggctgaggcaggagaattgcttgaacctggcaggtagaggttgcagtgagcagagatcatgccactgcactccagcttgggcaacagagcaagactctcaaatacatacatattgcattagtgagggtggctagcgtggctaggagggatatcacgagggagtctttggtgtcgcttaagtgtcttgtttgtgcagtggcttacacctgtcatcccagcactttgggaggccgaagcaggaagatccgttgagcccaggagttcgagaccattctgggcaacatggcaagacccccccaccatatctacaaatatatatataagaaaattagccgggcgtgctggctcactcctgcaatcccagcactttgggaggccgaggtgggcggatcacgaggtcaggagattgagaccatcctggctaacacggtgaaacccgtctctactaaaaatacaaaaaattagccgggcgtggtggcgggcgcctgtagtcccagctactcgggaggctgaggcaggagaatggcgtgaacttgggaggcggagcttgcagtgagccgagatcgcaccactgcactccagcctgggcgacagagccagaccccgtctcaaaaaaaaaagaaagaaagaaaattagccacatgtggtgacgtgcatgtgtctgtagtcccagctactcagttactcggggggcgctgaggtgggaggatcacttgagcccaagagattgaggctgcagtgagctgtgttcacaccactgcaccattccagcctgggcgacggagcaagaccctgaccaaaaaaaaaaaaaaaaagtatctcgtgacggtgtttagaggaagttatgcgtgtgataaaactgcataaaccacacacacactcacacactcagatgagtgcatgcaaatccagtgaagcttgcatccttccactgtgctggttttgaggttatactgcagttatgcaagatgtaaacatagctggggggctgggtgcagggtgcatcagacctccttgtaccttcccgtgaatcaataattattaataaataaaacgttttaaaaattgcaatgaaggccaggcacggtgtctcatgcctgtaatcccagcgctttgggaggccaaggcaggtggatcacctgaggtcagaagtttgagaccagcctggccaacatggtgaaaccccatctctattaaaaccacaaaaattagccgggcatggttgtgggcgtctgtaatcccagctactcgggaggctggggcaggagaattgtttgaagccgagatcacaccactgcactccagcctgggcgacagagcaagactccgtctcaaaaaaaaaataatttttaaaagagggtgtctcaaaacccatggtcacttggagaaatagaggagggggtcccaggcaggtgctatgctccctgcagctgcagctgggatcccaccatcttcacatctgacctggaggacatatcactaaccacggccctctcccgcctcctgggatcctggcaagccagactccaaccatacattcacattacacagatagggaagctgaggtcctgtgggttcctgcctttgtaaaatagggctcttagtgcctgtccgacctcctcagccagctgcggtaagtacacggtacagcggggccctcgaggtctcttgagggaaatgctgaaatgttcccgtaaccccctggcatccttctcgtgaaagtccaaactcttcccacagcccaccaggcactgtttgacccctgctggcgaccttcaacttcactggccaccttccctctcctccctccactcctcccagccaggcctcacctgttcctgctttgacacctttgctggtccccctgtccagtgctccgtcccaggtccccttggagctggcctctcccccgcttcccacatcagcaaacacgtcagcttctgagtcagacctcagaaggcctgggactcccagccacgtcacttttgtgatgcaggtttatcttctgcgtagggagcatgtgtctgcgatgatttgatccacttcttcatagggaatcatcgtccccagtgggttatgctctctgagcaggcagggggctctggggctggtgtctgtcactgctgtgtccccagcatcagggcaggaccaggcatagagtggtgcctcttacatactggatgaatgaatgaatgaatgaaccaatgaatacgtgaatgaatgatgtctcagctcttccttccttccagtctggtcctgaacaacgccttacctcttcaggtcagatccctgccccagcctgctctgggttaggggtgaggggtgggggctgggctggcagatgggacaagcagggaaggtcccctgacatggtttggctctctgtccccacccaaatctcatgttgaattgtagtcccgtgttggaggtagtgcctgatgggaggcgactggatcatgacggtggatcctcatgaatggatccacccctcagtcctgtctcataatagagttctcacaagatccggtatggcacctcctcccctgtgctcctgctccggccgagtgacctgcctgctcccctctgccttcccccatgaccgtaagtttcctgaggcctcccagaagcagctgctgccatgcttcctgcacaggctgtggaactatgagccaattaaacctcttttctctatcatttacctgtatcaggtatttcttttctttttgtggggcggcggggggttggacagagtttcattctcgtcacccaggctggagtgtagtggcacgatctcagctcactgcaagctccgcctcccgggttcaagtgatcctcctgcctcagcctccctagtagttgggattacagactcccgccaccacgcccagctaattttttgtatttttagtagagacagggttttgccatgtgagccaggctggtctcaaacttctggtctcaggtaatatgcccttctcggcctcccaaagtgctgggactacaggcatgagccaccgtgcccggcctgggtatttctttatagcattccaagaatggactaatacagtctcctctgccccaacgccactgggcctgcaaggaaattgtccacgttcacagaaagtccagctgggaggatgtccccagctaatgtgcacagagtgaatctggaaaccaacaccctagaaaaaagccacataaagacatctccaagcagagtcccagacgggtcctgccttgcctcccctgctgcatgtcctcaacccactccctccacctccccaccaccatcccatccttcgcttcctacacaggtcccctcctccactcttcaccccatccctcactttctacacccaccacctcctccacccttcctcccatccctcacttcctccacccatcacctcctccatccttcatcccatccctcacttcctacacccatcgcctcctccacccttcaccccatacctcacttcctacacccatcacctcctccacccttcaccccatacctcacttcctacacccaccacctcctccacccttcatcccattcctcacttcctacacccaccacctcctccacccttcatcccatccctcacttcctacacccatcacctcctccacccttcatcccatccgtcactgtctacaccgatcacctcctccacccttcatcccatccctcacttcctacacccaccacctcctccacccttaatgccatctctcacttcctacacccatcacctcctccacccttcatcccatccatcactgtctacacccatcacctcctccacccttcatcccatccctcacttcctccacgcaccacctcctccacccttcatcccatccctcacttcctacacccgtcacctcctccacccttcatcccattcctcacttcctacacccaccacctcctccacccttcatcccatccctcacttcctacacccgtcacctcctccacccttcatcccatccctcacttcctacacccaccacctcctccacccttcatcccatccctcacttcctacacccgtcacctcctccacccttcatcccatccctcacttcctacacccaccacctcctccacccttcatcccatccctcacttcctacacccgtcacctcctccacccttcatcccattcctcacttcctacacccaccacctcctccacccttcatcccattcctcacttcctacacccaccacctcctccacccttcatcccatccctcacttcctacacccatcacctcctccacccttcatcccatccctcacttcctccacccaccacctcctccacccttcaccccatccctcacttcctacacccatcacctcctccacccttcacaccatccctcacttcctacacccaccacttcctccacccttcatcccatccctcacttcctacacccaccacctcctccacccttcaccccatccctcacttcctacacccgtcacctcctccacccttcatcccatccctcacttcctacacccaccaccttctcaacccttcaccccatccctcacttcctccacccaccacctcctccacccttcatcccatccctcacttcctacacccatcacctcctccacccttcatcccatccctcacttcctacacccatcacctcctccacccttcatcccatccctcacttcctacacccatcacctccttcacccttcaccccatcctgcacctccccacccttcttgatcctttacaggcggtgagctgacaccccacgcccaccacagagacagggcgccatgctggtggggaatgcaggatccacttttttattgcaggaagactatgtctagagcgaaggctacacagaccccacgatgggggagtgggggcacccacatgcggggggagagggggcaggggcggagtcacagcaagcatggcctggcacagtccccagcaccagggatgcccaggcaggatgggccagcagccaggacaggctcgggtcccctcctattgcagatgccctctctccccagggtcgggcagggcctgaggtgggagaggcctggaggtgggcagggccccaaggagattgtgctatcagggtgtgtccctgagaaagggccgcagacccctgcccagcctcactctctccggcaccttcagaacccagaagctactgccaggacaggagaggaggcaacatcagctgctggtgggccctgggccagcccaagttttggggggacccagctctgctcagacacaatgccagctcttctgggagcccggtccacgtgctggatagcaacacacacgcacgtgtgcacactccctctctctgagtgtgtccaataaacatttgttgagtaaacactcacacgaacacagaggaaaacaaacatgcttgtaccaaatcagacacgagcaatctgttacctacatagtcccacctggccacatgactacagagacacatgtgtgcaatctctctctctctctcactgcacaaaagggcgtgcgcacacacacacgttgcttcctcacacccaataagaccaaaacctccatctcaccttccctcactaacttagctgccatgctccgagccccgctgtggagagacccacatggtacagaacaaagggcagcttccagccaacagccagcgaggaactgaggccttcagtcttgcaacagcaaggaactgaatgctgcaacaaccacatgagcttctaagaagcaaatccttccccgatcaggccttcagatgagacctctgcctggcgaatgctttgattgcagcctcctgagatcccaagtagaggacccagccaacctgcacccaggctcttgacccacagaatctatgagataataagcatgtgttgtttctggttgctacatttgtggtcatttgttacacagcagtagctgactgatacagatttggaaccgaaagtcacattgctagagtcatgttgctatagagtggaacacagatcgtgtccctcaatcaggacaaacatatttacagataaatgctctcagataaaccatatcacccactccccaaaatatagtcatgctcatacaggcacaaagattcacacagacacctcacacatatccagtcttgctgacaaccacacacaggtatctacaactacccacctctctgtataccctacaccactattacacacacagactgccacaaaaacatatcatcccagacagacacacacaggtatacacgcagatgcacttagatacaagtcacccatccgcgcaccccaggttgcacaaatacaccattccatagccacttccgtgtatgttggacacaaccctgtggggtcacacgagtgtggtgtcactcagactctctcaaaaaacacccagaacctcatggctgcaggtacactcgactccaggacgccaccttcccgggcaggccctgctctctggggcacaggtggtggggaggaagtgggtggggcagacctctgtccggggcgccctcggatcctgctggtgctggctcccatcggctgtccccccacgggggtgtaattgatgtatctctggccggggccccgggtaccccctcctgagcaccccaggtccccacccgccatgcgttgctaacgtctctgtcttggtggaagaggcgggtcccgggtgggcggtgtccgggaagcccctccacgcccatggtgcctctccagcggggcagttgtgctgtggatgtggctggtcccgggggtgggattcggggctggcaggggcactgctgcaggccctgtggttattgcctggtggcctgaggcccatcccacgggccccacaccccactgtgaagacagaggagagaggtgcgtctggaaccggaggagtgggcacagatcagaggtcacgacgggccgggtgggcttgggtgtatgttaacaccaaataggagaaaaaagaaaaaaatatctgaggccgatgtgcattttcaactcccccctcccccagaaggtcacagtgatcaaatgtgagggacaggacgcgcaggtctggctggggacaccccagggaaagagatggaaacggggaaacgcagcctcctctggtcctggtgggaacaagcagctcctcttgccagctccccatcctgttttcccatctgcaggacaagggggccacctccggctcttggttttggagggtacagacagaacaggagggtggagagagagcaggggaggaagaaaagccccagccctgcctcggggtgggcaggggcagcggaggggggggcggtggcctcggtttccccagccgaggtgtcggaggaaggatgagagaagaggaggaggccgaggagggtgtcggtgttgggggaggcagcgggggtcagtgggggtgggcggcgggcaggcgggcgttccgggctcacatgagggtgcatttgcccttgacgcggtctgtcctcttctgcttcccggagcgcttgccgtcgatgttgaggctcatgttccggcgcgtctccagcgtcagcagctcctggaagagctccttgacgttgtagttcatcttggccgaggtctccatgaaagcgcacttccactcctgggccaccgcctgcgcctcgcgcgtgtccacctcccgctgcgtctcatcgcacttgttgcccacgagcatcacggggatgtcctccacgctgcccttgatctgcacgatgagcttgtagatgggccccagctcctccagcgactgcttgctggtgacggagaacaccaggatgaaggcgtggcccttggagatggacaggcgctgcatggccgggaactggtggctgccggtggtgtctgtgatctgcagcgtgcacacgctcttgtcgcagctgatcacctgccggtaggtgtcctcgatggtggggatgtaggtgtcgcggaacgtgcccttcacgaagcgcagcaccagcgagctcttgcccacgccgcccgccccgaacaccaccacgcggtaatcgttactctgttccggcatcttccccgcggcgggtgggcggccggggccgggagggctggtgccagctgcaagaaccccagaccgagcctgtgcagagaggagggtcacacgtcaaaggccacccaggcttgaggggacagccccacgccccggggagggaggaggacatggcggcttctcagaggaggtggctgccgtgcctcctgcctcctgaaaaggcccatttgcttgtggctgactttgcagttctgtcccacaggcgggcgcacagccaacaccctttgcttacttctccctaacaaaatctggggcctgagcttccccgggggacgctgagctaggagaggcgtgggagacgccgggatgcccacgaaactccttccccgggtgtgggtgtcccttccaggctgtgccagcttccccctctcttcccagtgtggcaggggcccctggaagctagcaggcctggcttccacctctcgctccacacctgcctggctctgagaccttgccgagccatcatgccaccctgagcctgtttggtggctcaaacggtgcccgtctccaacaaccatgggtcccctgctcttccgccaacccagagatggccaatcctcatggaagccgcacatggtcgggtgtttaagatgcatatgtcagggccgcagccctaggtgtgatgaatcggtcggccagggcaacggccctgggaactcgtattttattttattcttcttatttatttatttatttttagacagagtttcgctcttgctgcccaggctggagtgcaatggcacaatcttggctcgccgcaacctccacctcccgggttcaagctattctcttgcctcagcctcccaagtagctaggattacaggcatgcaccacaaagcccggctaattttatatttttagtagaggcagggtttctccatgttggtcaggcaggtcttgaactcctgacctcaggtgatccacccacctcggcctcccaaagtgctggggttacaggcgtgagccactgcacctggccttcttattttttttaaaaccaagtcttgctctgttgcccaggttggagttcagtggtgcaatctcggctcactgcaacctctgcctcctcggttcaagcaattctcctgcctcagcctccagagtagctgggattacaggcatgcaccaccacacccggctaatttttgtattttcagtagagacggggtttcgccatgttggccaggctggtcttgaactcctgacctcaggtgctcctctcgcctcgggctcccaaagtgctgggattccaggtgtgagacaccgcatccagctggaacttgtattacagggctgctctcctcacctgccataaatgggatcctgaggctgggaatctgagaaccacaatttgcaaatcagggcactgattcccaatagccgccccagggaggaagggtcttgcagcccaggtgggacacaaaaatacaaaatccagaagctgaacgggaaaatcgccactccctaaactctaaaatcaaactatggcctggtgtgccctagcccctcccgttcaggtctgaaggatccttagaatagcacttcctgggaggggcacctcttagcccctctcttccttcttgggctcagagaggtccagcagcctgaggaggtcacacagcacagcagatcctgaaatgatggaggtgggggaagaacgctggggggagggcgggtggcttatctccagaattgatgtcctcccctccccttcctccttccaggctctggggcagcggtggggggtgggggaggggtgttccccagcaaggtggtctacagtgggagaggaggaggaaccagtttctacctgctgcactgggggtgggggtgtgtttatggggagggtccagaggttccccgggggtcagtggtttgaacctaaacaggcaaattcaagtccctaagcctccgttttctcttctgtgaaatgcgagccactgttggggcaagtaaggtgacaaggtggagaaaggccctaggcagtgccctgtacagcggagaccccgatcacaattgtgatcacagtcacaagggcttggggccggtgggcagggcacttggctgtgcctgttggttgcaaaggcaccttctggattatcaagggtaacagatttgccaggaaaagaaaagaggctgatgaaagcgccagctgacacagtccccagttgtgatgagccaggcaaacttctgggcgcctcggcaatgccaactcatgtgattggctgccgggtttgtggactacatgcatagtaatttctcggcattcggaggaggctgggggtgctggtggtgggggggaggcggcctgtgctgcagaccctgccctttcctgggtgggcgccctgagaggcgggcacgctgctgtgcagaaagacgccaccaagaccggcctggggtcctaatggccatgggttctgtggacccagatccagcctttgccttgctgcgggcactgaagctccagcccccatgagcagtactgtcctccccgctgggtctggaatccctgaccagaaaggcgcttgcactcaacagccccgaagcccacgccacttcccacctccaccgcctggggggtgcgggtggagggagggggtcgtgggcaccgaggcaggagcaggaggggctggctcaaggtcacagagcaggggggtggaggcgcacagcggggctggaagcccaccctgcttggctagactcctggggtttcccgcctgtgcggggcagcccacccccagacgtccaggcagggccaatctaccccagccctgggtccctgaagcccggctcccggccgggcacggcgtggttggtgggggcgggggtgtcaaagcaaagctcagggtcaggaaagcagagagagccgcgacccaggggtctagcgggggtcacgcctgaccaagggtggggcgggggtctgacccagggccgcctggccggtgaggggtttgatggagaaagggcctgctctagggggcccgagggcgcagaggcacagtgcggggccagcccaggggcgacccttgactcaggaggacctcagtggtggagaggaggagcccaccccggggagggggcgcggagggaggggcttggctgggcagcggggcggagggcgaagaaggcggctgcaggagggaggaggccctgcccgaggggaccaatgcggagaggggcggcggggtgggcctcggtggggcgggctcggcaggggggcgccctccgggtgggggaggggaggcggccgggagctgtccaaggtgagcgcggaggggccggccgggcccggcgggaagggacgggggacgcccggcgaggggccccggagccacgcggggaagggcccggccccaaggcccgggaggctggggccgggacaaaggagggacgcgcggcggggaggacggccggctgggggctgcgcagggaccccctccccgccccgggccgcctacctgggcccgctggtccctgcggcgccgcggccgctgctcctgcccgctccggtgtccgctggcgccgccgccccccgcccgcccgagccgccgcagtcgcgcccgcgccgtccccgcccgccgggccccgcgctccgccccgccccgccccgccccgccccgccccggggacccgcgcccacggggccggcgcgccgcccggccaaggtcaccgccgccccacgcgggacccctgcccgcgcccggggtgggagaggtcgccaggatccgggacccccgccctgccacgtagccacctgcgcgcgccctccctcggggtgggagctggggccgcttcccggggaaccccgagtgggggccaggagcccggcttgggaggagcagagtccagccgggggtggagggctttggcagaaatgcggataaagggggtgcagaacgggacccctgaggccggctggggcccggtcacacgcagggcggggaatcagaggggtgcgttgtgaaatgagtaagtcgataatcaacaatcaatgaacaggtttagaagcgggcagaggcgggagggttcaggtcaatggggtgcacctggaggcccacccatcccaggggcctgggcaggggcgggatgggggcagaagcggactcagcgctctgtagggctggttttgtggaggcggaggcagcccatggcagtcaggcctagggaggtggggggtgagcaaagggggctggcgctgctctgcagcggatgggtttgccgttttcggttaggaaaatgtttgtgttcccccaacaggaggtgtcttaggggagcactggcttttctgatgcgtctgtgtgtccacaagagaccatggttccgcctccattttggagaccgggaggccgaggttccttttggcctcatcgggcagatcccagaggagactggactttggggtctagtgaccaggccagaaggtgctctcaggggtgggtgcgggacagtcccaggccgcaaggctgtcagaggaaggcgccccttggtggagaggccaactctgggacccacaggggtctctccagagtcagagccatcagtgggtgagaggctggtctggaaggtggtgagctccccatcaccaggcctgtgagcaggtgaaccccttgggccctcagctcctggggttctccatgacccaccatttccatggccctggatgaggtgggcccatctgcctctgcggagacttggcactgcctccaagaccactcagtcccctctcctgttgccactgaggctggggcactgaggttcaagcggctttggggctcaaggagctctatttctccctgatttgaccccactccccctcctggcctccagaccccttcctccagccctccttccactctgccactcaatgctccaactgcaacatgggcctcccctgctctaacgccacccatggctcccttctcccaggccaaggtccagcttctcagcctggcatccatggcccggcctgagtgctcctggcgtgcacctccctcccaccctgaccccagccctgcgggagcacctcagagcatggcccggcccctgaccctcatctgggggtgccctcagcaggagatggagacagccctgagggcagacaaatcccagcttctgctctacatggctgcctgcagggaagtgccttctcaagcatcggttcccccatctgtgagtgacgtcactgttgcccgcctgtagggttgctgggaacacatgggcagggcgcccacctacacggggctgctgggcacccaagcactcagacggcagccctgccccttcccagtccgcctgcctgccttcgtctcctgagtgacccaccagcgtggggcagggcgtcgggccggctccctgtctcctccgggcaccagctcaggccggggcaggctgactcatgcgtaggagagtgggcagggcggtaactccacgctgcggctgctatttatagctcccaggccaggctgtgggccgcgtgagccggcgaggccaggccctgttcccctcctcgctgtccctgaggaacggggtctccacacatggcccgcggtgcccaggccacagatggcagtgagctcttccgagcacccaaactaggacagcaggagcttctcccccatggtgggccggggagcagagggttccgcctggcctttgtgagtgggggtgggtgggcgccccagctctgcctctccatggaaaggtccgtgatccaaatctcaggggccagggcacttgcacactggggcactgagcaagccggggctggcactggagtttcctgggttccctgctgcctctcatacccgagtccctctttggagagtccctcggcatcctgagaggcacagaggtgggcgaggaggactgaggccggctgcatctttgccaaagagaagaggacctgtcaacctctccagctcgcgagctgggcaggatccacaggcgtccacgttgagtccccagggtgaaacccaccggggcagtctgcatgggtcctgcaaacacaaagtgccagtgtagtgggtgctgggccctcagcagtctgtacaaggccactgtccctgctcccatctggaaactgctgctcagagaagggaagcggctcgcccacggtggcctagtgggaaagaggtcggtccggatccatcaggctctgaagccatagcccagcctgctggggatagacggccacccccttgtgatcctcttgccctgtccctggctatctgcagtcttgtcctggggacactcggccggtcctgccttacagatctcctttcagcagaacagcaagggacggcgttcatctgcaatgtccagctcctcccccggccctgcagctccacgaccgctctcctcaccctgctgccctgaccagggccacgtgggcctcactgagccccggctagcctttggagaggagggcagtggggtccggcctcagctctcttcagtggtctctggaccatgtgggcaaagccgaggttgcacatcctggcctcagggggcagagtcaccccaggggctcagccacacagttgcttttcaagtttagcatctgtcaatcaatcagtcaatcaatctaccacctatctatctatcatctatcaatcatctatctgtcatctatcaattaatctatcaatcatcatttattaatcatttacctattatctatcaatcatctgtcacctgttcatctattatctattaatcatctacttatctatctatctatcgagacagggtctcactccgccacctaagctggagtgcgtggtgaggtcgcagatcactgcagccttgactttctgggctcgagcaatccttcctcctcagccgcctgagtagctgggactacaggcacacaccaccaggcccggctaattttaaaaaatttttctcggccgggcacgatggctcatgcctgtaatccctgcactttgggaggctgaggtgggtggatcacacgaggtcaggagttcaagaccagcctggccaacatggtaaaaccccgtctctactaaaattataaaaaatgagcccaatgtggtgacatgcacctgtaatcccagctacttgggaggctgaggcaggataatcacttgaacttgggaggcggaggttgcagtgagctgagatcacaccactgtactccagcctgggcaacagagcaagactctgacttaaaaaaaaaaaaaattctcgagaccatcctggctaacaaggtgaaaccccgtctctactaaaaatacaaaaaattagccgggcgcggtggcgggcgcctgtagtcccagctactcgggaggctgaggcaggagaatggcgtgaacccgggaagcggagcttgcagtgagccgagattgcgccactgcagtccgcagtccggcctgggcgacagagcgagactccgtctcaaaaaaaaaaaaaaaaaaaaaaaaaaaaaattctgggctgggcgcagtggcttacgcctgtaatcccagcactttgggaggctgaggtgggcagatcatgaggtcaggagtttgagaccagcctaaccaatatggtgaaaccccgtctctactaaaaatacaaaaattagccaggagtggtggcaggcgcctgtaaacccagctactcaggaggcccaggcaggagaatcgcttgaacccaggaggcacaggtcacagtgagccgagatcgtgctattgtactccagcctgggcgacagagcaagactctgtcccaaaagaaaaaaaaaattctgtagagataaggtcttactatactgcccaggctggtggcatcaatattttaaaatacagagaccatttgtcaaaaaccagtttgccttcaaagatgaacaggctgacatccccaagcccatttctttttcgtttgtttgtttgtttttgccctttggcatctgcagagctgctcgccgctgctcccccagcccccaggccaccatggaagacccacgcctcacgctgcctggcccctagagtcagcattgggttcctctctaacatcagggggctatgattttttgtgtttgtttttagacagagtctcgctctgtcacccagactggagtgcagtggtgtgatcttggctcactgcaacctccacctcccgggttcaagcaactcccctgcctcagcctcccaagtagctgggattacaggcgcccaccgccacacccggctaatttttatacttttagtagagatggagtttcaccatgttgcccaggctggtctggaactcctgacctcaggtgatccgtccgcctcggcctcccaaagagctgggatgacaggcgtgagccaccgcgcctggccagggtgctgtttcatcaccacctctaaggagtggggttactgaatctttagcattggcaggataaactccggtaacgcctgggtcttcttagagagaagaagccactctgatcatcagagaaaaaaggctgagaactacagaggccccagggcctttgcacatgctgctgcctcagccagatgagctctctctcccccatctccttctcactcacttcctccagtccccctcacgtcaccccagagactgctcctgaggagaccacagaactaaaatcatctccttttgctgtctctcaccgtgtcctgattcttttcagggcctttattgctacctggtaccgcctaacatgctggcgtcggctccctctccagaatgtgagccgccttagttctggggcagcagttcccacgggggggggggggggggtgattgtgtcccaaggggagactgggcactagatgggaacgtctgtggttctcacagctgtgggtgcacctggcatggagtgggtggaggccagggatactgctcagcaccctgcagtgcccaggacagccccgccccagagaactatctggccccagtgtccacagtgcccacagggagagaccctggaggggtccatgggtctcaaactttgcccaccccagcatggccagcgttgcctgggaactcggtggcatgcaagttctcaggcctcaccccagagccagggctgcagctcagcttcccacaaggcacaggatggccccagatgtccacaaagcccaggcacagaagcctgttctgggggccagctcatctagcctgagtctggctggacctccactagctgagacggaagcccagccagcccgctcacctcttcctggagaagcccgacgcagcgcccgccactccctcccctccgtgtgcagctccccggctctaaagcactcacttgtctaacccgattctcaccctacaagaccgcaaccggccatcacttctgccctccgccaggacaccgaggccagctgtgtcactgccccgaggggttgcaggtgcagagccgcagaggcctgaggggtggcagggagagaggtgggggcatcttcccactccagccccgtctggcctcagcacctgacagccaggagaagagttctggggtcttccagacaagcccccacgtcctgcagcagcctgtgctccctcgaaagggagatgactcctctaccttcaggagcctccgcctccttcccacctgcagggggaccctggaaaggctggggcagcctccgagcatcgaggtgaaggccgaggagtctttattggtgacaggctgctcaccggctgtcccaaaagcagacacagctcagggcacaagctgcgtgcaggctggcggctggaacaggtgggaggcagccccctctcttcccggtggggcagagggtccagagctgctggccaggacagtctgatggtgccaagggctgggagacaccgtcccatccaccaccgacctccccgtcccgccccgagctaataacttgtgcaacagaaatgcagacaacagacacgtagggccaacaggctgttattacggctgactcaaccccgcaggcctgggcgctgcctcatcattttctccccttttgtctccggatccaggtgagggaatccagtgatgccatccagctgtccatgctgagaacccaacgaggggcttccttcccgctggagcccacgcctgcgcccagcggggaccccgagctcaagtcccggagttaattctccagcttgcagagctgagagacgcccccatcctggcccactctctctgccccaatagaaaaacctggacccacctggggtctaggcaaggctgctgggtctgtttccggtggggcagcagctgagcctgacctgggtccctcccgcctgtgacctgcctggtcatagacaagagaagcccctggccaggcactggcctaggggtggccgtgacccagccaggagtgctgcattcggacgaagatggcactgggtgctctgcgcttggagttttggttttttgtgtgtgtttttgagaccaagtcttgctctgtcgcccaggctggagtgcagtagtgcaatctcggctcactgcaacctctgcctcccgggttcaagcgattctcctgcctcggcctcccaagttgctgggattacaggcacctgcgtccacacccagctaatttttgtatttttagtagagacggggtttcgccatgttagtcaggctggtctccaacttgtgggctcaagtaatctgcccgcctcagcctcccaaagtgctgggattataggcgtgagcccctgctccgggccggagttttgttttttaaacaggaagctgtcttgtgttatccaggaacaatctgtccaagctattcccggtctctaccagcgcatgaaacggttggcaggtgccccctctcctccctgtgtctctctcatgaacaggtggttgacatagaccaccatcacctgtcctgggtcttctgtgagttgggctgggtgtctccccctgggccctgtggacattgggactgaaccgttctcaagggtggggccgtcctgggcactgcagggtgccgagcagcatccctggcctccacccactccatgccaggagctcccctagtcaagacaaccacagatgtccccagacatggcccggtgtcccctgggggcagaagatccccggctgggagtcacagagtcagtaaaagagacccccaaggaggaggacccttggcttctgcaggtcacgtgacatttctgtgactcaaagttgtgtagagatggaggcggccatgtgcagctggagctggcctgctctgcagtgtcgtgacgtcgttttgaggcaggagtagtctgtggctgcaggcagtgacaaacccaggcttcctcaagcagtggctcctagcattgggtgacagtgtgtctgtgggcagagccagaggagacagagtcgctgggctgcctcacaggagcctggtctaggccggacccggccgccgtcggccaagggaccttgggaatgagccctgcgcctctggactctatatcggatgggcgagacgaccactccacgtctttaccccaacatggacatgtgctgggttcctcctcaaaagcgggtaaagcccccaggcgcggtggctcacgcctgtaatcccagcactgtgggaggctgaggtgggtagatcacctgagctcaagagtttgagaccagcctgaccaacacggtgaaaccccgtctctactaaaaatacaaaattagccgagcgtggtgccgggcacctatggtccctgctactcaggaggccgaggcaggagaatcacttgaatccgggagcagaggttgcagtgagccgagatcatgccactgcactccagcctgggagacagagcgaaactccatctcaaaaaaaaaaaaaaaaaagtgggccgggcacagtggctcacacgtgtaatcccagcactttgggaggccgaggccagcggatcacaaggtcaggagttcgagaccaacctggccaccatggtgaaaccccgtctctactaaaaatacaaaaattagctggccgtggtggtgcgcgcctgtaatcccagctacttgggaggctgaggcaggagaattgtttgaagccgggaggtggagattgcagtaagccgagatcgcgccactgcactccagcctgggcgacagagcgaggctctatctcaaaaaagaaaaaagagtggtgacagccgaccaaaagtggctcaagagacatccttctgccttagggtcccgctggccccaggaaagctcctttcgtgcctcctgaggactctgggacggagaggtctggaggccacagccagctcgcccccgcccccgcctacgtcctgctttctggccgctgcctctggtctgctgcagtcaaaggagcagggccagccctgagctcccacccagcgccagtgggggacaacgtggtgtcagaggctcctctagagggaaggcgaagaagccgcttgggatccttggggtggggtggctgggcctgcaggggtcgacagcttgggtccctcgggccaccctggggagctgatggctggtggagggtagggccccactttgtgcttcctgctgtgatgggcgaaggtggatggggatccctggagcagccggtgctccgccccatgtgggctcctgcgggattcgggggacagggactctgagccttcccatgtggggggcctggatgtctctatcccctggcagtcacgaaaactcaagccacatcccccaccagtgcagggacccagtggcttcacaacccacccacctgggataaaggacaaatggcccaggtggggtgaagccaggggagggacgggcagaaccacgtcaggttcaggacactgcgaagctcctatacccctggggccagggccaggctgcacagggttcagagatggatccccggtaagaggttcagacacaggttcccagaacaggccccaagcttccaacagcagtggggtaaggacctcctggagtggaagttggggggtctcaggagcagaggctgaaccccgggttacttatagaccccctaaagtggaagttggggggtctcaggagcaggggctgaaccccaggttacttacagaccccctggagtggaagttggggggtctcaggagcagaggtggaaccctgggttacgtaccgacctcctggagtggaagttggggggggtctcaggagcagaggctgaaccccaggttacttacagaccccctgaagtggaagttggcggggggtctcaggagcagaggctgaaccccagggtacttacagaccccctggagtggaagttggggggtctcaggagcagaggctgaaccccgggttacgtaccaaccccctggagtggaagttgggggggggtctcaggagcagaggtggaaccccgggttacgtaccgaccccctggagtggaagttacttacaggggctgtgtgactactccggcctcctgggacccccatggcaatgctccaggcagccaccgccctctcgaggtcgtcccttcctgtgactggcacctgggagctgagctggctgcagcagggccaccggccgggacaccccacagagcagtcactggctggccctggagctccccatctgactagattgatggactgatggataggaggccccgccaggcccaagcccacaggccagatgggcacctctccgtgcagccccccccagtcagccttgtgggtaggtgtagggaggcgtggtggcgaggcagggcacgggatgggagaagggtacctggggcctggcactcaaagatgagtgacgaggtgggaggtggggacagccagaggccctcacagccctgatggggctggaagacgccaaggcccagagatggggtccggggctccaggtcagatcaaggaaaaacccagcccaggcgggcatgcccggctcccttccgcggcgccacagcggcttcgagccaggcagagcaaaatccccgaggaaaggcgtccctccccagctctcacctccccagacccggcagggttgccgggacgacggctcaggccttccggaggttgccacagagccaggagcccagggctgccccagcccacgcccggctgctcgtcccccgtgctcctgccctctcgggagcagcgtccctgtgtccacgggagggatcgcaccgcggggcccctgccccaccgctagtggggtccatcttcctctggagaccccggtgtgtgtaagcagagctgaggactgatctttaagctgcctcctggccctgctcgtgagtctcaggaaactgtgacactcacctggcccgggggtcctggcccaggggtccccgctccaggagccacccagcaaagggaaaaggagagggcactcctgagggtacatggcccactcacagggggtacagccttgtgtggcaggagggacggagcccggctgtcccatcgcagtgactccaacctctaataagcctcaagacactcggggctcgggcggcgagatcctggcaacagagtagggtagacgttggggcctcagggcccccagctggctcctgaggcacaggcggcgcggccctcactctggccacagcagccaaatgctcccgtccttattcacaggctgggggtgtgcggcagggagaggagggtcctgaccgatctcaccgggacccaggtcctggccctcccgcccgtgggttgccacaccccacggcccgaggttgacatggccacacagctttggtaaagacttttaagagaaagaagtattttaaaaagtagcagtgctctgaggctcagggtgtaggatcgggggcacagcctggtcccgggaggccccttgtgcacaggtggtggcccagggccacagtgctcgctcttgggggacgcgcggccgggggacgcggcctgtgtccggcccggggctcccggcgggctccggcggcagggacaatggcgaggccgctcaccacttgaggaagaccatcccggccaggacggtgtagcccagcaccaggaagaggaccttgagcagacggtcactcttctcctccagctccttggccaggatctccaggaaggtgatgaagaggaaggtgccgcccgccaggccctgcagcagcacggacgccacgctgcccggcacgccctgggcgctctcaatgcccaggcccaggccgatgcccagggggatcatggcgcttacggtgaccgccagcttggccgcgtcccgcaggggcatggcactccgggccatgctgatgcccagggccacggccaccagtgtctcgtggacggccacccccacgaacaggctcaccactttctccccctcctcctgcaggcccagggccaggccctcaaagaccgagtgggccgacagcgcgaaggccaggctgagcaggcgcacggggctggcgcgcgagaggccctgcacgctcaggctggggccgtggccgtggggctccacgtacagcgcgtggccccgcgcgccccccatgaaggggctctcatactccgagtcgctgcccacgtccgatccggcgttgaaggtctccaggtcgatgaaggacggcttctccttgcggaaggtcaggatcagctgctccaggaagacggtcatgaagaagcccagcaggaggatggtttcggccagcgggtagtcggtgctgatgtggccgaggctcaggaccttctggagctgcagccggggacacccgagagagagagagagacccacgctcaggggtggcggcgacagggctggccagatgtcaccgttcaaagcaaagtccagaaatccccgattcacacagaggttaaaacaagtgggagaggaagggctcgcctgtgatgaattaacaccaccaccaccagccaagcgcggtggctcatgcctgtgaccccagcattttgggagactgaggctggcggattgcttgagcccaggagttcgagaccagcctggccaatatggggaaacatgtttctactaaaaatacaaaaattagctgggcatggtggcgagcacctgtaatcccagctactcaggaggctgaggcaggagaatggcttgaacccaggaggcagaggttgcagtgagacgagatcgtgccactgcactccagcctgggcgacagagggagactccggctcaaaataaacacataaagagctgcactggccttgcgtgttctgccgcggggcctcctctctgcttccctgaccgacatgcctgggcccgactctcctcctggtcagggctctcctagcgaggggagactttggtggggagaaactagacgtgggtcagacgggagccgcagggcgtctgcaagaggtacacactcctatgggagggacagctgctcacggggcggacacgcaggcattaggctatgcgccaggatgaaatgtctcatgaaaggcaggctgtaaacgcccacaacagctccctggagcctcgtcacggcagggccagagttcacagccaccctccagagagacctcgagaccaaagtggaggaaaatcacaacacaatcgacactcaacaatgcctgcttccctgcttccttcccagcggagacttcattacaacctgcgcacgtgcacacacacacacacacacgcatatgtgcacacacgcacgcacacacacgcgcacacgcaggtgcacacacaagcacgcgcacacagtggttctcaaccagggcgattctgcccgtgtggacacctggcaatgtctggaaacattttttattttcacaactcgggtagggggaaggtgctgacattcggggctggattgttctctgggacggggccgtcctgggcactgcagggtgctgctgagcagtgtctctggcctccacccactccaggccaggagcaccccccatcgtgacaaccacaatgtccccaggcatcgcccagtgttccctgggggcagttcacgctgggtgagcctctgctgcagcagaaggctgtgtttccacggagaagccacttaactccctcactgaccaccggctggaggcctcatgcatgcctcgcttgaggacaagctcatgaggaactctagctactcccaagagacagacgttgatcaggagagatgaggcagatgcacgggagctgtgaaccaggcaccattttccaggggtgactgagagcctggccctgcagtgggtgaggctgggggctcgggagtagggacctcatccgcctgaccagcccgaggacaggagaacggcgggaaaggtttgggtgccatgagaaggccactgtgatgagggggagggaagagcaagctccccgcagtcgcccaggcctgcagtcagagggtgacgggggtgacaccatgaccatgggggaaaaggggggctggcagtggcctctgcgatgcaggagatgtcagagatgaccaagatctccatcctcgcagtgcagatgtcagtcttcacacaccgcgtaacgaacgaatgcagactcagccacgcggaacagcaggaatgcggtgtctcggctctgaacggtggaaatccaggtgcgggctagctgggccctacgctccaggtctcgcagggtgtcatcagggctgagatctcactgacacccagggtcctcttccaagctcactggaggtcggaagagtccacctcctggtggctgtggactgaggccccgtgtcctggctggctgttggcggggatggctcttggcaccgagaggctgccctcgggtcctcgcttcatgcccttctcctggcacaccctggctttttgcttctccaaggccagcaggagggtgagtggctcacctgattaggccaggcccaccccctcccttttgatgaactcagcgctaaccgatctggggcggtcatcacagctgcaacatcccctctgctgggattctgacataatggcaggagtgacacgcacggcagtcccagccctacccacactcgaggggagggaagagcatggggcgtgcggagcaggggctggaagctcagggagccaccctggaactctactctgccacactaacaggctcagatgatttaatcccagacaacagcccttctcctcctttctggacactaggcacgaggaaaagcagggccaggggttgggggataagcttagggcttccatgctttcgttgggaggaagaacagggggtcctcatatctccaccaagtatgtaaccaacacaaattcaatgtcacatctggcactggcccagagagaggaagccactcacccagggtcacccagcaagcatggccagggctggtcacactgtggcctgacaggggacccacactctgggctgctgatatgggggagctcaaggaacaggtcagcagaggatgatgctgtcaggagttggggtggacagactccaagatggccccagaagcccctgcctcttgacagccataccctgtgaggtcctggccacttgagtatgggaaggacttgaacttgcttctaaccagcaggacactggggcagaggggaagggataccctgtcacctctgcatgacatgggactgtgccctctgtcttacacagagtcatggccatcttctccatttgctgatgaaggaactgatcatgctggggaggtccacgtggccaggctctgagggctgccccagccaacagacactgacaaacagacaccttcggtctgacaaccaatgaggaactgaacctggcttacaaccacatgagcttagaggccgacccatccccggttgaacgttgagatgagaccacagcccaggagacactgtgactgctgccttgtgagctcctgaagcagtgcccagacccctgactcacagaaactgtgagatgataaacgtctgtagtcctaaggtgctcagtttgctataatttgttacgcaacagtagctgactgatataggaaccgaagagaggccatgctttccagcttcaggacagagtgtgccctacctaggtgggtagtctggtctgattatcaggtgacaaccgacaagtccacctgttgggaatcccaggtctggtccaaaccccttgtttggccggtagagcacagagacagaaagtaaccagttcacaatcacacagcaaattcacttcctactttccgtcacccttacagcatcaaggccttcactgaacttggcatcagtgttgaaaatgcatcagagtcccttggccataaggtgccaagggctgctgctagtgcccagggagcccttaccttttccctcacagcgggcagcagagcgttgaagcacgtggccagaaacacccctcctccaaaggtgttgcagagagagaggatctttttcgagcgatgggccttctcaaaatctgtctcgatgatcttcacggggagcagggagccgagcagcatgaagaagaacacgcccaccatgcacaggattttggccactagcaatttcaccatggtggcggcttgggctgctctggtcactgcagggccaaaccatctgtgggcgcacacccaagtcccacgatgtgctaccgagcccaaccacacagttggaggctcatgtctcagtccagcaactgtgaacatcaggggcactgcattagctttctttcttttttctttttttttttttagacagagtctcgctctgttgccaggctggagtgcaatggtgcaatctccgctcactgcaacctccgcttcctggattcaagcaattctcctgcctagtagctgggattacagacacgcgccaccactcccagctaattttttttgtatttgtagtagagacgaggtttcatcatgttggccaggctggtctcgaactcctgacctcgtgatccgcctgcctcggcctcccaaagtgctaggattataggcgtgagccactgcacctggccagttcttcagttttggaactcggactggctctctttgctcctcaatctgcagacaatgtattgtgagaccctgtaatcgtgtgcaattaatacttaataaacttccctttatatatataactattccattagttctgtccctctagagaaccctgactaatacactgtctcaaaaaaagaaaaaagttcatcaaaattaaaaaaaatccaggctgggtgtagtggctcacacctgcaatcccagaactttgggaggccgaggtgggtggatcacctgaggtcaggaattcgagaccagcctggacaacatggtgaaacgccgtctctaccaaaaatacaaaaattagccggccgtggtggcaggcacctgtaatcccagctactctggaggctgaggcaagagaatcgcttgaacccaggaggcagaggttgcagtgagccaagatggcaccaccgcactccaggctgggcaacaagagcaaaactccatctcaaaaaaaaaaaaaaaaaaaaactaaataaaatacaaaattccgctcctcagtctccctggccatatttcaagcgctcagtagtcacacaagcctacttgacttctgtggttaccgtatttgacagcaaagggaacactctcatcactgcagaacatgctattggatggtggtggtccatggcttccccatgccccgaaataaagtctaaactctgtaccctgaggctgaagctctgcatgacaagctcctgcctcgcctcggccctcactggtcctttctgtgccaagcttgctcgtgcctcaggacctctgcatgggttctcctctctccacctggaacactgctctctttcccctgaccttccagcgaggcctccttcttctttcttgcttctctgcatccaggacccctcaaaagggcctccctcggttgggagtggtggctcacacctgtaatctcagcactttgggaggctgaggtgggcagatcacctgaggtcgagagttcgagaccagcacctgaggtcgagagttcaagaccagcctggccaacacagtgaaacactgtctctactaaaaatacaaaaattagctgggtgtggtagtgggcacctgtaatcccagctacttgggaggctgaggcaggagaatcacttgaacccaggaggtggaggttgcagtgagccaagatcaagccattgcactccagcctgggtgacagagtaagactctgtctcaaaaaaaaaaaaaattagctgggcatggtggtacgtgcctgtaatcccagttactcgggaggctgaggcaggagaattgcttcaacccaggaggtggagcttgcagtgagccgagatcgcgccattgtactccagcctgggctgcagagcaagactccgtctcaaaaaaaaaaaaaaaaaaaaaaaaagggcctccctctctgcccctggctgactcctgccctaaaccatatccctgtacccgccggaaggcctgctgcagaacagatactcaaaaaccgctggctgaacacatggacgaggggaagcgtgtggccactgataagggccgcattttacctgatgcaatgggccaaagtgaagtcggtttcaccctggaccccaaaatgtcaccgttcttaggaggaatctcagctcctcccctgtccttgagttttccccaactgggttttctcccccaccatcagccccaagcgcctcatggccccgctacctcactgcattcaggtcttcgggtcactgctcagatgtctccactcagagctctccccgcccccttccctggtgttattttcttttattttgtgctacagagggagctaggaattacattattttaagtcatttaaagtcgtccctcccccccggcggtgagctgggcgggaccaggctgtctgtcttgctcagggccagctgcacccagcgcagagccacccaggcacacagtaggcgcccaataaagacctgtccggcatctggatacctcagtctgtacagtgaaggtgagggtggcctgcacgctctcaaaccggaggctgctcgggccgggatgaggagggcacgggctcattcattcaatcagcacttattgagcgccttctgtgtgcctcgcgctaccgggcaccggagacgggcctcggctaacgtgcgggtagagtccaacagacccccggccgctcagcgccgccccgccccgccgccccaggtcctctctctgcccgcacctacctcccgggggcccctcgtccgccgactggcgccgctgcacgcccaacggccgcgcagtctcgaccccacagacgcggcccggagaggccccgctcggcgcggctggtccacgccccgcccacgcccctgcccattggcctccccgagacccgctggcagaactttccatactattggctgcgaaacctgccactcatatgcgactccacctctcctaccggcacaggaaaggggtttcctcccgctgagcggcgggcgcagccaccaagcggccccggcgggaaacccggattggcgaggaacggttccggcagggttgggtttccagagctgtccaggggcgcctggtgctgaatcccgcttggaaagaggcttggaggtggatgggaagggatttccaacggaggcggctcctctctcagcgtcctcgctgctgatccccttaccgacggctgaagaagcagattcatcccttcaacaaatctctgttgataggcaggaggagtaagtccaagagatcgactgtacatcatggtggctacagctcgtaacaatgcattgcatactgcaaaattgctaagaaagtagatgttacatgttcaaaccatgaaaaaataagtataggaggtaacgcgtaagttaaaaaccaaatcttggcagggcgcagtggctcacacttgtaatctcagcactttaagagaccgaggcgggaggatcgcttgagtccaggagttcaaggccagcctgggcagcatagtgagaccccatctctaaaaaaaaaaaaaaggttttttttgagacagagtctcgctcttgtcactcaggctggagtgcaatggcgcgatcttggctcactgcaacttccgactcccgtgttcaagcgattctcctgcctcagcctcccgagtagctgggattataggcgtgtgccactatgccggctaatttttgtgtttttagtagagacggggtttcaccatgttggccaggctggtcttgaactcctgacctcaggtgatcctcttaccttggcctcccaaagtgctgggattacaggcatgagccactgcgcttggcctgatgacttgattctaacaaatagaaaatggcaaatgaatgggatgtcattctgcgattaggctatgagagattgtgacttctgttttgccagcagagcctgtctctcgccttctcagcctacgtgtcttgacaaagcaagctaagatgctggagagatccagagggaaaggaactgagggtgtcctccagccaacagtcagcaaggcaatgagaccctcagcacaagcgtccataaggaaccaaatgctaccaacagccatgaacgtgatcatggaagagggtcctgccccagttgagcctttggatgactgcttcacttcaattgcagcctttgaaacaccctaaaacagggctgcatgtggtagctcatgcctataatcccagcactttggaaggccgaggtaggcaggtcacttaaagtcaggagtttgagactagcctggccaacacggcaaaaccccatctctactaaaaataccaaaattagccaggcatggtggcgggcacctgtagtcccagctactaaggaggctgaggcatcagaatcacttggacccaggaggcagaggtgacagcgagctgaaatcattaccattacactccagcctgggcaacagagtgagaccctgtctcaaaagaaaaaaaaagaagaagaagaagaagaaagaaagaaaaacaaagaccctgaaaacagaagacccatatgaactgcatctgaattcctcacccacagaaactgagataacacatgctgttctagccacttagttttgtgtttgtttgcttgtattttgagacagggtcctgccccatcacccaggctggagtgcagtggtgcaatcacagctcactgcagccatgacctcctgggctcaagcagtcctcccacctcagcctcccgagtagctgggagcatgtgccaccatgcccagctaattttttacctaatgtcacacaggccagtcttgaactcctggattcaggaaaccctcccacctcagcctcccaaagtgctgagattacaggcatgagccacaatgcctgctggcactaagtttgggggaaaatttgtcatatggcagtaggtaactaatacacatacatactagaaaaactataggttgtactaagttctgtgaagaaagaatgagagagacttctgtgcaggaattagccaagtcaaatgtactgagaaggccaggtgtggtggctcacacctataatcccagcactttgggaggctgaggtgggtggatcacttgaggtcaggagttcaagaccagcctggccaacatggtgaaaccctgtctgtaccaaaaatataaaaattagcagggcgtggtggtgggcgcctgtaatcccagctactcgggaggctgaggtaggagaatcgcttgaacctgtgaggtggaggtcgcagtgaaccgagatcatgccactgcactccagcctgggcgacagagcaagactccgtctcaaaaaaaaaaaaaaaaaagaaaaaaaagtactgagaagtggggagagaagagaggatagttgacaaaaagatggagaagggcttgctgcatttgaggagttggaaagccagcctggctgaatgttcgtgagcagtagggagatgggagattagggacagtcccatagaccgtgctatggaacttggattttaccgtaattacagtgtgattcattgaaggattttaagtaggtgaaggttgtcatctaattttaattcttaagattattttgactcgtgtgtaaagaaaggctgaattatagagaagcaagaatggaagcagggagactacttcagagccctctgggcaagagttgggctgggtgccttggcgcacacctgtaatcctagcacattgggaagccattgcaggaagatcgcttgagcccaggagttcgagaccagcctgggcaacatagtgagaccctatctctatttctaagaaaagacttgacggtagtttagctgagggcattgacaggagaaaggacagtgggtgaatttgagaaatattttggagggtgaattgacaggacttagcactggtttgtctgtgtgggttgcaggagaaggaggtgttgggggtgacttctggttttctgctttgagccatccgatggattctggtgctcactaaaataggaaagactggaggaggcacagagattgaaagcgtcaaaagacagagttcagtttcacagaggctataaatgagacatctacaagttcttagcatttaatgccattttctgcctgcgtggcgctgatgtcatcatgtggaacacactgtttctggtagctatttttattattagatgcagagtgatctgactctgtttctgctttccataactcacgacaagaaaaagatggcttgtaacataagcacaccaggtagacgccacaggacgactccttcctaaggggaattcatagcatgcgatatttattcataattgtttggagaatcagcctgctcagggaaagagctacgtaagctttgggctttgattcattcagtacgtgtttttgaaaacctcctgtgcaccagaagccatgtaggagcagatgtcttcagagcgcaacagaaaaaaaatactaataaaatataaaataacataaaagcagcacagtggtgcatacctataatcccagcactttgggaggctgaggtaggaggatctcttgagcccaggagttggagacaagcctgggcaagatgatgagaccctatctctataaaaaaaaaatactgacaaattgactgacttcagtatttcaaaaatcttccatagtaaaaaacaccatgaatgggcttaatagacaagtgacagactgggagaaaaatgttgatactatatgagacagagcccttgatagaaaatagaaaataaacatcttaaaataaaaataggaagggtgatgaatgagcaattcacaggggaaccaatataagaggtgaataaatataagaaaagagtctcaatccatgaagataatcatgaaaatacaaaataaaacaaggggccaggcacggtggctcacacctataatcccagtactttgggaggctgaggcaagaggataacttgagccctggagttcaagaccagcctgagcaacatagtgaaaccctgtctcttcaaaagaaaaaaataaaaaataaaaaataaattaatcacccaggtgtggtgacacatgcctgtcaccccagctactgggaggagggaggattgcttgagcccaggagatcaaggccacagtgagctatgatcatgccactgacctccagcctgggcaacagagcaagtccctgtctcaaaaacccaaaacaaacaaacaacaacatcaaaacaacaacaaaaacggctgggcaaggtggctcacgcctgtaatctcagtgctgtaggaggccaaggcaggcggatcacttgaggtcaggagtttgagaccagcctgaccaacgtggtaaaaccctgtctctactaaaaatacaaaaattagctgtacctgtaataccagctaggtgggagaatcacttgaacccagggggcagaggttgcagtgagctgagattggtccactgcactccagtctggcaacaagagcaaaactccacttcaaaaacaaaaacaaaaaaaacagagaaaaaattgaaaaaatctgaatgtagactgtttattaaataatcatgtcaatattcagtaatgtttaatttcctgaatttaacaattatactgtatttatgtaatagaatgtccttgttcttaggagatacaaaatacatgatgtctggaactttcatttgaattgttcggcaaaaaaataataattattatacatatacacacacataagaagagaaaaaaggaaatttggtaaaatgtgaagaataagtgaatctaggtgaagagcataagaaaattcactgaaagccgggcgcagtggctcacgcctatcatcccagggaggccgaggggggtggatcacctgaggtcaggggttcaagcccagcctgggcaacgtggagaaaccccgtctgtactaaaaatacaaaaattagccaggcgtggtggcatgcacctgtaatcccagctactcaggaggctgaggcaggagaatcactgaacctgggaggcggaggttgtggtgagctgagatcacgccattgtactccagcctgggcaacaagagcaaactccatctccagaaaaaaagaaagaaaagaaggaaggaaggaaggaaattcattgaaatataaacgtggattttttgttttggtttggtttggtttttggtttttgggggctttttttggagacggagtctcactcttattgcccaggctggagtgcagtggtgcagtcttggctcactgcaacctccacttcccaggttcaagtgattctcgtgcctcagtctcccaagtatctgggactacaggtgcctaccaccatgccctgctaattttttgtatttttagtagaaacaggatttctccatattggccaggctggtctcgaactcctgacctcaagtgatccgcccgcctcagcctcccaaagtgctgggatgacaggcatgagccaccgcatccggcctcacatgacatttcattatcacatcttcttaggctcctcctggctgtcacagtttctcagatgttccttgtttctcatgatctggacagttttgaggaggacgggtcagatattttgtggaatatttcttgactggggtttcctgatagttttctcatcgttggactagagctgtgtttctgttgtttgtttttgaggaagactatagaagtgagaggccatccccatcacatcacatcatagcaaagcccatgcagtcaacatgacttaccactgttgacactgactgggtcacctggctgacatagtagttgtcaggtttttctactgtaaagatccttattctttttttgttttcttttttttttttttttttttgagatggagtctccctctgtagcccaggctggagttcaatggcatgatctcagctcactgcaacctccacctccctggttcaagcaattctcctgcctcagtctcccaagtagatgggattataggcgcccgccaccatgcctggctacttttcgtatttttagtagagatggggtttcaccatgttggccaggctggagttttaccgtgtcgcttaggctggtgttgaactcctggtctcaagtgatcgtcctgactcagcctctgaaagtgctgagattacaggcatgagccaccaagcccagccaattattttgtgtgtgtagagacagactcttcccatgttgctcaggctggtcttgaactcctggattcaagcaatccatccgcctcagcctcccaaatagctgggactataggtgcgtatcaccacacctggctaacacttgtttttcaggtccttcaacttgagctatcctggtgtagttgtttgctactatggtttttttgtttgttactatggtttttttgtttgtttgtttgtttgttttttgagatggagtctcactctgtcgcccaggctggagtgcagtggtgggatctcagctcactgcaacctccgcctcccaggttcactccattcccctgcctcagcctctcgagtagctgggactacaggtgcctgccaccacgcccggctaattttttgtattttagtagagatgaggtttcaccgtgttagccaggatggtctcgatctcctgacctcgtgatccgcccacctcggcctcccaaagtgctgggattacaggcgtgagccaccgcgcccggcggctactatggatttagttagtgttctcctgatgtctaatgacattgagctcttttcctcatacttatgggccatttgcctatcctgttttttggaatgtctaagtgttttgcccattaagagaattgggtcatctctcttctcactgatttgtaggagtacttgatatttttataaagtacatattgcaaatgtcttcacccactcaatggctcaatttatccctctattttgatggcatcattattttaatgaagtctaattgttgattaaaaaaaaaaaaacttggccaggtgcagtggctcacacctgtaatcccagcactttgggaggccgaggtgggcggatcacctgaggttgggagttcgagaccagcctgaccaacatggagaaaccccgtctctactaaaaatacaaaattagccgggcgtggtggcaggtgcctgtagtcccagctacttgggaggctgaggcaggagaattgcttgaacccgggaggcagaggttgtggtgagccgagatctcgccactgcattccagcctgggtaacaagagtgaaactctgtctcaaaacaaaaacaaaaacaaaaacaaaaacaaaaaaaaactttatggttagcgctttttgctttctaagaaaattttgcctaccccaaaatagactctatattttcttctgaaacccttgtggctttaccttttgcagattgtatttgtataactctcaaaaacaggcagcacccacccatggtatcaaacgctaggtcagtgtcaccctctggggaggcagtgagtagcgggagtgtggggggactgggaggcagtgagtagcgggaatgtgggggcactgcttaggtttggtttcttggtgtaggtgccaatgatatgggcgtgttcccctcatgaaaattcatcatgatgtttgcttcttttgagacagagtctcgctcttgtcacccaggctggagtgcagtggcatgatctcggctcactgcaacctccgcctcctgggttcaagcaattctcctgcctcagcctcccgagtagctgagattacaggtacccaccaccacgcccggctaattttggtattttttagtagaaatggggtttcgccatgttagccaggctggtctcgaactcctgacctcaggtgatccacctgcctcggcctcccaaactgctgggattataggtgtgagccacagcaccccacccatgatgtttgcttatcattcacactttggtgtaggtatgttacacttgcattaagtctttaaaatgcctgtagtcccagctactcaggaggctgaagtaagaggatcacttgagcccaggagtccaaggctgctgtgagctatgatggcgccactgcactccagcctggggaacctatctcttaaagaaaaaaagaagaaggagaaggagaagaaggagaagcctggcacagtggctcacacctgtaatcccaactttgggaggccaaggcgggagcatcgcttaagatcaagagtttgagaccagcctgggcaacacagcaagaccctatctctagaaaaaaaaagtatccaggcatgatggcacatgcctctagtcctggctactcaggaggctgagggaggattgcttgagcccaggaggtcgaggctgcgatgagctgtgactgcaccactgctctccagcctggaaagaagacacacagaaagagagaccttgtctcaaaaataaataaaaactggctaagcacagtggctcacgcctgtattcccagcactttaggaggccgagacaggtggatcacctgaggccaggagtttgagaccatcctggccaacatggagaaaccccgtctctactataaatacaaaaaaaaaaaaaaatagccagacatggtggtgtgtgactgtagtcccacctactctggaggctgagacatgagaatcacttgaactcaggaggcagaggttgcagtgagccaagatcgtggcactgtgctctagcctgggcgacagagcaagattctgtctcaaaaaaacaaaaattaaaattaaaaaataataaataagtaaataaaaatgtataaaggttgaaaaagcaccattaacgaaagagagggagacagaggaacggggctccccaagtctacctgggcttggcaagaattcgggaccaccgtgagctgatgagaatttctggtttctggtgggcttcgcgggtcctcgcgcgcccacgctgccgggcctcatgtctttgaccctgcatcccacaggtatctcagggccagcctggctccctggtccactgcgtgcatcctcttggctccatcaaagcacgagcacccggtaggacatccctgcttcggaggatgttttctccgtgtcattctgaaaggagacccgattctaagagcaaaactctagcagcagggcggtccctaggctctggcccaggtggctgcagaaggagccacgccttgtcgatcacagccctggcagctgcggacgcacgtgggtgcccgcgggagaggccgtggctgccgcgccccctggcggctccgtgcggaatcgccccggctccccatttccgagaccacatcccggatgcttggactccaatccaatgttaattttttattatttagttatttatttagagacggagtctcactctgtcgcccaggctggagtgcagtggcacaatctcggctcactgcaacctctaactcccgagttcaagcgattctcctgtctcagcctcctgagtagctgggattacaggtgtgcaccaccacacctggctaatttcgtatttttagagatggggtttctccatgttggtgaagctggcctcgaactcctggcctgaggtgatcctcccgcctcggccttccaaagtgctgggatgacaggcgtgagccactgcgcccggcctttttattatttattttattatttttaattttattattttatttgagacagtctcactctgtcgcccaggctggagtgcaatggtgtgatctcggctcactgcaacctccgccttccagttcaagcgattctccttcctcagcctcccgaggaactgtgattacaggcacctgccaccacacccagctaatttttgtatttttagtagagatggggtttcaccatgttgaccaggttcatcttgataccatagtaaagcaggaggaaggaagggaggacccatgtacccctgaatctaaaatttaaaaacaggccggcgcggcagctcacccctgtaatcccagaaatttgggaggccgaggtgggtggatcactagaggtgaggagttcgagaccaacctggccaacgtggcaaaaccccatctctactaaaaatacaaaaaaattagccgggcatggtggtacatgcctgtaatcccagctactgtggaggctgaggcaggagaattgcttgaatccaggaggttgagcctgcagtgagctgagatcgccccactgcactccagcctgggtgacagagcgtgactctgtctcaaaaaataaataaaatttaaaaataataactaaaattagctgggcgtggtgtccatgcttgtagtcccagctacttgaaaggctgaggtgggaggatcgcttgagcccaggaggttgaggctacagtgagctatgctcacggtgctacactccagcctgggcaacagagccagaccctgtctctaaaaagaataatttgacctaagatatttttgcaagatggagaacaggatggggaaggtcactttgttttaggttttcaagttactcagtttggggtgaaatgttttccttcaaagataccgggacattccagagtcagtgacaaattatttttcctaatggcaaaacggtttgggacatggatttgacacatttatctagagagtaccatgtgtctgggcttctcctcctctgtactgtggacatttggggctgaattattctgtggggtggggccatcttgggcactgcagggtgctgagcagcgtctctggcctccacccactcaatgccaggcgcaccccccagttgtgacaaccacagatgtccgcagacatcgccctgtgtcccggggaggacaactgcgcccgttgagaagcaccaattctgcaaaagagaaaaacactatttgtttcctcctcgtggcttcctgggacttaccctggaggggtttgcaacatagtccctgctgggtcaggctttgtaggaactgcaccccaagcgtacagagaagcagagggcagagccttcctaattccacgattacacctggaggttcaacctactcctggagccctgagtcacgacttacatgaaacccaagtttaattaccgcttctttgctctgcgcatctctgacaggaatattcagaactaccctatttcaaacttgtgtgggatcaagcagccattatctatgacacgcttctcatcaagtcgcgcagagaagccactggttctgggatgagatgacagctccccctcgccacccctcctcttctccaccccttggtgattccaaaacaaactttctggaggtctctcaaaggcttgggctgggtttggggtcaactgggaagagactgtgcaggctttcctggtgatggacacgagatgggaggaaatgagccgaggtcgtctacgaagactgaagagcgtgccggctgcggctgggatacacggctcctgcaacagtgtccacaggtgtttccgggagtgggattctccaaacagaggcatcgcgatcacctgggctgcttgtctacagtgcagatccggcccggcgcggtggctcacgcctgtcatcccagcactctgggaggccaaggcgggtggatcacctgaggtcaagagttcaagacccgcctggccaacatggtgaaacccccatctctacccaaaatgcaaaaattagctgggcgtggcggcgggcacctgtaattccagctactggggaggctgaggcaggagaatcacttgaacccaggaggcagaggttgcagtgagtcaagatggcaccactgcactccagcctgggcgacagagtgagactctatctcaaaagaaaaaaaaaaaatgtaggccgggcgcggtggctcacacctgtaatcccagcactttgggaggccgaggcaggtggatcacgaggtcaggagatcgagaccatcctcactaacacggtgaaaccccgtctctactaaaaatacaaaaaattagccgggcttggtggcgggcgcctgtggtcccagctactcgggaggctgaggcaggagaagggcatgaacccaggaggcggagcttgccgtgagcggagatcgcaccactgcactccagcctgggcgacaaagccagactccgtttccaaaaaaaaaaaaaaaaaaaatgtagatacatgtgggtgggccccagttgtgtgttcatcaagctctctgggtgactcttgacacccaccaaactttaagacccagtggtccatctctgtcctgcttcgggcatgagccaccaagcccggccctgacttatttttaatttttcgagacagggtcttgctcttttgcccaggctggagtgcagtgctgtgatcatggctcactacaacctcaaactcccaggctccagtgatcctcctgcctcagcctcctgaggagctgggactacaggtgagcaccaccgtgtctggctaattttttttttggtacagatggaggctcaccatcttattttttgtttttcagacggagtttcgctcttgttgcccaggctggagtacagtggtgcgatcttgtctcactgcatcctccgcctcccaggttcaagcgattctcctgcctcagcctcccgagtagctgaggttacaggcttgcgccaccacgcccagctaatttttgtatttttagtagagacagggtttcaccatgttggccaggctagtcttgaactcctgacctcaggtgatccgtccgccttggcctcccaaagtgctgggattgcaggtgtgagccagggcgcctggcctggagtgtctgatttaggcctggggtgaggcccaagacttggtgtttctactgtgcccccaggccacgctgctgctgctgagctgaggacagtctaaaatgcatccagggttccccttctaccgccccggctctgtggacactggggccagatcattctctggagggggccgtcctgggccctgcagtgtgctaagcagcaaccctggcctccacccccaccattgcaacaaccactcacgtccccagatgctgcccagctaagtgtgccccgggggaagagccacccaggtgagaagctctgcctgagacctgaagcgcccacctgcctcccacagccaggccccttcagcactagacccagcaaccctggggtggctgttctttgaattttgtgactttttggtgtgtcatttttgggagatgacagaggtagtggctgaacctgaaacttcgcccctgcagatctcggttcttcctgctattgcaggggtggagaaggtgggtgcttgagccagggtcctgagccagagtccctgccagggctccgccaggttcagacgctcacgggtggggtgacctcgggcctgatagccaggcctcggtttctctgtctctagcatgagggtgccggtgcccaaccttggcttgtgggaaacaggaattcacagtccacgaaagcttagaggactttcagggagttgttctttcatttttatgtttttgagacgtagtctcgctctgttccccaggctggagggcaatggtgctatctcagctcacagcaacctccgtctcctgggttccagcgattctcctgcctctgcctcctgagtagctgggattacaggcacctgccaccatgcccgccaatctttttttgtatttgtagtagagatggagtttcatcatgttggccaggctggtcttgaactcctgacctcaagtgatccacccgcctcagcctcccaaagtcctgggatgacaggcttgagccaccacacctggccaagggagcagcttctatgttcacaacaaaactctgtgcagcaccctagggttggggctgagatgggcctggaagctttctgggctccttcttgcctgggactccctcactgacccattctctcaactggagccgttgtgaaagggaggtgcctttggttacagaatacagaatttatggagttacagtatgctagaaaagcaacagacaaagccaggtgcggtggctcacgcctgtaatccctgcactttggaaggctgaggcaaatcacctgaggttgggagtttgagaccagcctgaccaacatggagaaacctcgtctctactacaaatacaaaaaattagctgggcgtggtggtgcatgcctgtaatcccagctacttggaaggctgacgcaggagaatcacttgaacccgggaggtggaggttgaggtgagccgagattgcgccattgcactccagcctgggcatctagggtgaaagtctcaaaaaaaaaaaaaaagcaaagcaaagcaacagacaatacgatcactctctgctgaggaccgaggcatctcaccccaccctggggtgaccctctacaccgggatgcagctggggacggaggcggagggaagggagacagcagagggtagaggctgactgtccgaaacctcccatgacccgtgacccgtgacccaagaagtgcggctccggcgtcgcggggattcactcacaagcagcccagctgatccacaaactccgcgtcgggggttttctcgaggtttggggttggagggtatcggtggcgccaaggtcaacacgaagacagacagaggtcacaacgcctatttattccccacacgtcacgccctgcaccccgggtgggcttggcacacacctcaccgccatgagcggctgcagggccgcggcggcccccgttcctactgctacctacgatacacggtactgcgcctacctcacagacggccaggagccagggagccccaggatgctccgactgacaaccctgctgctgggaccacggcgccgtgggctcgtctgccacccccaggcctcaggaacccagacaggctgcctgctgtccggctctccggctgctttcctggtggctgttttagggccaaggtgggtggcacctgaggtgtcccgtggcctccacccagcacaggaggggtaagcttccctggggggccccgggcccatgaaacatccaggacagaaggacagcaggatgggacacagacagaaacggcccagctgccttccctgtgcccggggctaaggcggccgggacagaaggtcatgatgtcgcccctggctctcagtcgcgaggaccagaaaatgagggtgggaggaggggaaacatgtctgtcaacatgcccaactggagaaaagtcacagaaactggtcctatgcacccaggacggctcctgagccgcggaggcgtggggtgaccgcagccgtctcttaggtgtctgccactaaagagttcctcatgcaaacacacatggcccgcggtgcccaggccgcagctggcagtgagctcttccgagcaggcacagggccggggtggccgggaggtcgactcggaaagaggcttctcacagacgggagagttcctgcagacagaccacgggatggggggcgggggctgtaaaaggctttggaagccacacgatccgccacacggctgaacgtgaaacctgccacttctctgagagcggcccgggagcaccccaggattctagaaaacactcaagtgaccgagctttctgggggctggaagggaggtcgctgctggtctgtgctcagcttgctggctctcgtttcaagaagggtctgggggctgtaagggagttacaaaaagggagtggaggagggcagagataaaaggggaaaatccatcttgacatgcaggtccgaggtctctctcttcccctctctcaggcagtccaacaggaggaagtggcagacaaccagaaggcttccttcgggtcggccagggaaggacgcggtcacaccgggagcagctggaaggggacagacatgaaggctgtcagagcgcaggtggggaccaaggctgcaccacacactccaggcagcaggagaggcccagagtggacagccaggggccacagcggctatttcaacgaacgtcagagccacagctgcaccagaagcgttccacacactcggggccacgtgtggctggtggcgcagagaacatcgccatgacctagaagggtctacagtatggtggtactttgtgtatgaggttacggtggtaaaaaatccacctcaactattaaaaaaagaaaaggaaaaataaataaaagcttatttaaaaaaaaaagggaagactggaagaaaaggcggccaaaatattaatgttggtggctctgggtgagaagattaaggttgggctgaatgcacggctcacactttgggaggccgaggcgggaggatcgcttgagcccaggaggttgaggctgcagtgagacgtgactgcaccactgccctccagccggggggacagagcaggacggtctcaaaaaaaaaaaaaaaagattaagattgttcttgctgctttttaacatttttgtattttaaatttgtctacagtaattatggtttaaaaatgaaagagagtgtatatgaggaggggacaacgacaaaatgaagaggccacatgggagcagaatggaaacacctctggggaggcccggagcctcccgcccccagggagccggcgtctgctggagacagacaggactgaactcaggggagcctcccacccctgggaagccggtgtctgctggagacggacaggactgaactcaggggcccctggggaaggaaaccaagccagccacgggcccctggaacccatgggggacactgagtgtatttttaaacaactgtaagtgcaacacctgctcacagtgagaaaaggacaaaaaatccctcacaaaatgcaggcagaacgctcgggcgcagtcaaaggcaggtacccggcttgtcctttccaccactcgatgacctcgcccccacccccgaggtggcagccccgacactgcagaaacaaagagcttctgcaggcggccttaggcaggggggaccccagacaccagcccttccagggagctgtggctctcccctaatctccacccagcgccgatccacagatgggaaaggagtggggagcaggacttggtggccacctggaaaggggcccaatgcccagagatgcccccacctgcctgggcggttcagggtgatcttctgagctggatgcacccaggactcgctgtccagtgtccagacaggctccacagcccccgggcgtcactcctgctggctgccctcactgccaggcactcacgtggtgtcactcctgctggccaccccccagcccccggccccatgcactcacgcagcgtcactcctgctggtcgtcgttgctggcgctgggcgtccgactccggatctggctcctgagctgctctatcaactctgggttctgctgctgcatctgctgggcaaactgctggcccctgcggggaagggcacatggggctcagccagggccaggaggctgcctgctgcctccgtccatccccagctgacccctcgggccctccaccccaaagacaggcctgacccctcgctggaggacgctgggcccttcggagcaggggacgcagcactttcgctctcctccttcccttccgcctgcgagccctgcccgccgcccacgtcctccgtcctcttggaagcagttccactcacgcctggatgaggctggccaggtcgttctgcgaggggctggtgccgggagttcccaaggggttgttgccacccgaaatcatgccggacatgctgcaggagagagcgcgtgactcgcagccgggacagcctgaccgccacccccactgcaggccctcgcagtggcccgggagagaatccctctcagcccttcaccttcccctgcaggagaggattctctctcaccacctggtgggcctccagggcccaaacccaccctgtgactttcacctgctttcccagaacacccctctttctttggcctaaagagcgtagttctcagccagggggtgatcctgcccccagaggacccctgcaatggcagcggacatttgcaacagccatgattgggttacgccaagacaggggcagggggtgctcctggcatggagtggatggaggctagagacagtgctcagcaccctgcagtgcccaggacggccctgctccagaaactggtccagctcaaatggccacggtgctgtggctgggaaaccatgctttaagatttgaccgtgggccagccgcggtggctcacacctgtcatccctgcactttgggaggctgaggcgggtggatcacctgaggtcaggagttcaagaccagcctggccaacatggtgaaaccccatctctactaaaaatgcaaaaatcagccgggcatggtggtggatgcctgtaattccagctacttgggaagacccacttgatcccgggaggcagaggttgcagtgagccaagattctgccactgcactccagcctgggtgacagagcaagattctgtctcaaaaaaaaaaaaaggagaaagaaaaaaagatttcaccatgaaaacaggtgagcagctccccagtgcgcacagcgcttactggggagtgaccctatgagccagcgagtgcactcagaagtttatatccaagagaaacgaaaacaggattcacacagacgattgcacacccgtgctcaagcagcaccgttcacaacagacaaaaggtagaaacagcccaaatgtccatggatagatgtgtggatcagcacagcgtggtccctccacactggaatattactcagccatgaaaaggagcgaggccctgacccaggccccagcacacatgcaccttgaggacgtcacgctcagtgagagacgccagacaccaaagttcacgcagtgtgtgatcccatttctacgaaatgtccaggacaggcccatccacagagacaggaaggggatgcgtggttgtcaggggataggagaggggttggggagtgacagctgagggggaaggggcttctttcggaggtgatgaagatgggttggtgctcaatggtggtgacagttgcatgacagtgtgatggtggtgacagttgcatgacagtgtgatagtggtgacagttgcatgacagtgtgaaagtccttaatgccattaagttgcacactttaaagtggttagttttatgttaagtgaatttacccacaataaaaggaaatttaaccacaacaagacccgaagaaacccggttgtcacttacagctgctgaatctggggattgttcattaggttcgaagcctgaagaacagaacaaatttgtcaggaagacaaagctcccagcgcatcattctctttcatcagacactttccatcttaaccagccttggttctggactccagcacgccaaccaacagtaagagccgggcattcggtctttcatacccttttccctacattttcgcccccccacccacgagctgtgacctccacattgtgacttaaatcctgttttgggttcctgcttcaggagcgatctcgcagcgccacagcgctctctcactggctgctgcggttttgctgtgtggaggcgttttggttctttattttagctgctgtctgctttagcatatttcatttagcatatttggttccagttttgctctatcaataaatagcactgtggctgggcgcggtggttcacgcctggaatcccagcactttaggaggccgaggcaggcagatcgcttgaggtcaggagttcgagaccagcctaaccaacatggtgaaaccccgtctctactaaaaatatgaaattagccaggtgtggtggtgcatgcctgtagtcccagctacttgggaaactgaggcacaagaatcgcctgaacctgggagggggaggttgcagtgagccgagatcacaccgctgcactccagcctgggtgacagagtgagactctgtctcaaaaaagaagtaaaaataaataaataaataaatagcactatactgggcactttctcatgttaactttccacttgggattattcctttggacctgttgaaaggaggtggctcagaggtgtggcaaactctctgtgtaaagggccagtgtgtaaatactctcagccttttcagacacgggtgcctgacgcaactactcagctctgccgccgtatcatgaaagccaccagtgacactaggtgtatgaatgggcatggctgtgtgccaataaaactttattggtcaggtgtagtggctcacacctgtaatcccagcactttggggggccgaggcgggtggatcacaaggtcaggagttcgagaccagcctggcaaacatggtgaaaccccatttctattaaaaaataccaaaattagccaggcatggtggtgggcacctgtaatcccagctactcgggaggctgacgcaggagaatcgcttgaacctgggaggcggaggttgcagtgagctgagatcacaccactgcactccaacctgggcgacagagcgagactccatctcaaaaaaaaaaaaaaaaaaaaaaaccaaaaaaaactttattaacaaaacccagcggcgggccttattctgccaaccccagatgtctgaagggaaaaggcgtctgtgacatggccaagctgagaggccccttgaaagactggggcccagtcaccctccatcccatggtgagggagaacatattcccctggcagcttggccagcggacgagggctacagtaagaggtgtggcctctgctgaatggcacgacccgggcagggctcctggcccagctggctcatttttctgactgacagtgagactgagggcttttctccccgacagccttaggcgagtccctgtaccctgaggctgtgggagcctgaagagtggtcccagggcacacagacctcccaggaaatgaacatgtgtgtgtgggggatggctctccgaggatcccagtcaaggaactccctgccaaaggccgtccctttggaagcatgagtgcccgggcatcgggaggtccacctgcgcccggcgcacccggcgctctgcttcccttgcctgaaccttaggaggcagacgctgctgtgttgtgatcagtgtctctgcactgcgaggaggagcccacgccagggtggggtgggggtgtgacctccctgggctcagccaggagagccagcttttggtgctcactactgatgggtcttgcttgggacatcaacattggggacacttttgattgtcgaagcagagggtgggggtgctcctgacatggggcgggtgaggccaggggtgctgccagcgccctgcggtgcccaggacgaccccacagacaagacccatctggttccagaagccagcagtgccaaggcaaggaagccctggccagtagcggacacagcagatgcgggcctggggggtggcgcagacaccatggacagggaggaggggcgggccgttaccatgctcatgaagccagggttgttcagcaggccggcgatgtcgaagctgcccacgcctcccgtctgaggatgagaacagccctggttagtggggcctggaccagaggccacggtgaataaccccctggaactcagaaacaacggccccccacggggctcagacattctatcaaccctgcggccagagggtgctttgaggcaggcagcacgaagcacatcgcaaccgcccggggacggcacagtctgtcatcccgtgtttattccccgcacagcgcgaccgcccggggacggcacagtctatcatcccgtgtttattccccgcacagcgcgaccgcccggggacggcacagtctatcatcccgtgtttattccccgcacagcgcgaccgcccggggacggcacagtctatcatcccgtgtttattccccgtacagcgcgaccgcccggggacggcacagtctatcatcccgtgttgatttcctgtattctgccgctttgacaccttggggccttgctggcctggcagagccgccccctcctggagtagccaattcccagagaaagcaaatgactcacccagaaacgcacctttgaaatacaaacaaactaacccagaacccacaccctcagcacctcccccatcaccccagggccacagtccacctgccccactcacccccaggccagggaccaggcaaccaggggcagcccccaggcctgggtctaatgaaatggctccaaccagccaacccgaagcctcctcacccggcctcgccacaaaacccacatcgagggtcctttctgtgcccctccctcagcctccgcgggcagccctgcggccggcctcctgcttccaggggtctgggggcatgaaccttctcacgacactcacttccacgcctgtgcatctcaccaccaactgaaacaaaccccggaccctcacgacacccaggttaagcctagagccactggtgcgcccgaggacctgtcccccacccacacagtcagctcggcgttctggagccactcgcccccgctgcactcacggggctgggggcctcccgcagcttcagctccgctatcttgaggttggacttgtatgtctcgttgtcggggtccagctccagagccttcttgtagtaagccacggcctccacgtgcttgttgaggctggagagcgccaggctggaggagagcaccggggatggactgttcccatctgcccagctccaggaggccccgccaaagccctcgtccccggcggtcctggcaacccccaaaccacctcggatggtgccaccccctgcccgctgtcagctcagtggagacaaacctggctttcgaggggcccaggggcaggactgagggagacagacatgagaacacccctgccacacaagaactggagtccccatggggccacacacagggcctcaaagcccagagcgggctgagaggagggagcgggccagctcagggtcacaggaaatgcgtggatgttgtcttggccccgcttcccggcacagggcaccaaggaccctcggaacctctgagcgacagacatgtctcccgtcatccacaagcagcccctgacccccacctgagtgagtcttcactcgtgaggtgactcagggcccctacagagcccaggaggaggcgggtcctggggagactgggcagttgaacagggcccctccccagcctctggggagacccaatcccacaaactctgagcaagggcattcagagaagcaggcgaatgcacgcttatgctgggagggcggcaccggctgcacggggcgcaggctcctgccccggggaccctcctggcctcactctcggacctgtcctgtgtccttcatcataaaccaggtgcttccctgagctctgtgagccgccccagcaaacaatggagcctgagtaggagccatgggaaccccaggtgacagccagtcagggagaagcaaggggcccagggatctccgggtggcacctgatgcggggcgtctgtggggctgagcctgtgacctgtagggactacgttggctccgaacagctagtgtcagagttgaactgaaccggggtgggagaattcgttgtgggtgggaaaaaagccacacaagagaggaagcaggagcaggagaggaggggtcccgagagactggaaaggcgcggccgtggacaggcactcaccccatcctgccgtaggccttgctgtaggccgggtcaatgcagatggcccgctcacagtcctgcaccgcgcctgcgtagttgccgagtttgctgtaggctgcggctctggggaagaaaaggcagggcaggtccctcactggcggctctgagcccagcgggcagcccttgaggggagcctgagagctgcgttcctctccaacttcctggaggaacggcctcagttttccccatctgtaaaatggggctgatggggaaagctgagaggtgtggccactgagatgctcttagacaaatgtgggctcaaagcaccagcagccactcaggactgcgactctgaattttatttgcaaaaaatgttccgatccatggctgtacaagagcaatgagggtagggaacttatacccaagtttcattcacaaattatttacatatcagtaaaaaaagaactcagaccaatgtcaaagctcaaagctcttggcttacagcgtctgaatcgtcttcaccattttcgtgtttagtgtttctctttacaattttttcaaagtacagagaagagtgagtggagactaaactaccccatgacaggcggccaggaaccctgcactgcctctgcaactgtcctgtaagcctgaagcagatccaagaccacacattcaaaaaacacaaccctccacatactggattattttcttggcttgacatccacgtggaatgccatgatacctgattttctatgtatgtatttatgtatttattatttttgaaacagggttttgctctgctgcccaggctggagtgcagtgacacgatctcagctcactgcaacctctgcctcccgggttcaagtgattttcctgcctcagcctcccaggtagctgggactacaggcacccaccaccacatccagctaatttttgtggtttttttcggggtttttttgagacagagtctccctgtcacccaagatggagggcagtggcgcaatcttggctcactgcaacctctgcctcccaggttcaaaccatcctcatacctcagcctcttgagtaactggtggtgcccaccactacacccggctaattttgtatttttagtaaagacggggtttcaccatgttagccaggctggtcttgaactctcaacctcaagtgatcccccccgcctcagcctcccaaagtgctggaattacagacgtgagccaccgcgcctggcccccagactaatttttacattttctgtagagacgggggtcttgatatgttgcccaggctagtcccgaactcctagcctcaagtgatctttcccccatggcctcccagagtgctgggcgtgctacctgattttaaatcagcatcgactctccccgaccccgttgctggtcacctgatgctcgctcctggtctgagaccaccggtgaatggatccctcatctacagcgcagaggcctctcccatctcaggtccctgctaagcatcccggaggacgcccccgcacccggccgcccctgccctgggcaggccctgagctggtacctgttgcagaaatagacggcgttggctgggttgagctcgatggcttttccgtagaaatgcacggcagcttcaaagttttccactttcatctgctcgtttcctacagggagagaggaaaacaccggcccggtgtccacacagaccggagggggtgtcagggagagaggaaaacaccggcctggtgtccacacagacccgagggggcgtcacacttggctcttctgggcagccaggactcaacacagatgccggctcaggaggcatctgcatctatagggggttcgctagtcgcaaacaatcatatctacatccactaagggggatggaggtgggggcggcagggcctggcctggcctgtgcctggcgacggtggctgtcactgcctggatggcgaccccgggagcagaacagttaatacagctcaccggcccggggacggaaactgtccctttcgctattgcttttggaaagagcccaagtggaggcctgtattttggaatactcatgtgataccttctcatttcataggcaatggggcttctatctgaggcatgggtcccagctggtaggacggtaaaaaccccagctgctatcctagaactgagagccctgaagacagaaacccactcccgcccccgagatcccaattcaggagggcgtggggggaagatgggtatcagcgtgtgtttccctaaacagttttattgagatataatttacatgccacaaagcttacgctttaaaaatataagcccgggcgcggtggctcatgcttataatcccagcactttgggaggccgacgcaggcggatcgcaagatcaggagaccaagaccatcctggccaacacagtgaaacctgtctctactagaaatacaaaaattagccgggcgtggtggtaggcttctgtagtcccagctactcagaaggctgaggcaggagaattgcttgaaccagggagtcagaggttgcagtgagccgagatcacgccactgcactccagcctgggcgacagagcgagactccatctcaaaaaagaaaaaaaagaaatgggatcacatgctgtgcgtccttttgtgtctggcctctctccctgagtgtgatgtcttcacggtgcatctgcgctggggcctgggtcagagcctcacccatccacattccaccgtgtagatgggccatgctgtgctgaccatttagcgtggacaggcatttaagctgtttttgcttctttttattgttttattttttattttttatttttttttgagacggagtttcactcttatcgcccaggctggagtgcagtggcgcgatctggactcactgcaacctccgcctcccaggttcaagcaactctcctgcctcagcctcctgagtagttgggattacaggtgcccaccactgcacctggctaatttttttgcatttttagtagagacggggtttcaccatgttggcccaggctaggcttgaactcctgacctcaggcaatctgcccgcctcggcctcccaaagagctgggactgcaggtgtgagccaccgcgcccggcctcttcttgctttttgactcttgtgaatacagctgctgtgaacatgtgtctgggttttggtggacatgtgtctctcttgggcacatatctagtatcagggtggaaccggcgggtctcatggaagctgtgcaacttttgggggccaccagccagtcttccacaggggccgctcccgacaaccccaccagccgtgctgtgcctgaaggtcaagtttctctgcacctcgccagtcccctcgccagtcccccttccgtccccgtccccacaagccagcgtgctggtcatcagggcaattccctcagctccctgggccccagggaccagctggcctctgcgagggtcccacagccccggagtccaggtagggcgaggtgtctgtggggatggaggtcctcccttaccttcggttttgaggcgctctgcctctgctgagtcctcctcggaaggcggggttcgcgcggggctcctcaggtcctgcggcatctcctggacccggaggcaaaggcggcccgctgtcctctcctcccaacctggcaccctccggccttagcttccctcgggacgccagagagggccaccaagttccgaaggacccgggggctctgcaggggactcctggccccccatcatgtggccctgggcgagtgaccacagcgctatgtgtctcaggacccgccgatagggggaggagggccaagtgctcctgcagccacgtccccagcccaggagaggatgcaggcagagtgctgggggacgatgagagcggggctcctggggtccccagggctgcctgctgttgctgttcttattttgggggcagtggctggggaagcatcgaggctcaccttgcccgtggcagccgcttcaaatatctccggcagagtctgagggagcgcaaggtcactgtcttctaccgtcaccccaaacgcagtctccaggcactggatggcgactgaagcggggacagaggcggtcccattcattgcacgcagccccgaggttacgtttttgggtctagagggcggggttggtgctcatgcttccccaggtgtgttcattcccaaggaccccagaacgcaggggccgccgcctgtgctctgggctgggacagtggaccctcttccttcccgaaaagaaaagccagacagagacgccccgtgcccctgagagcagcagaggccgtgggcagagtggagcccaggtggtgacctcaggcctctgtggggtcccaatgctggggctgcccggctgcggcgtggtgggggcttggccccacctggagggccacgtcaggggtgaggtgccccggatgctgttgcacctccaagggcgcctggcctgagtaaggagcttgaagccagcccccagtagaaggcctgtatgactgggtctgtaccagggcaggaccattgagagcaggacaagaaacagccacagggcccctctctctgctggcccacctgacagactcagcacccagggggccctcccaccgagccagacaacactagccctggccgcctcctcgtgtggacccagggtcctaacccaggtcagaagtgggggtcagccacttcctgcccagcactgtgtcaaggaccccgggcacatccctacagctgtcactgggtgtccatgctacagaggcctggcaggcccaggacacaggtgagcgaggcataggtggggaaggaggacctagagcagaacctgcagccacacgagggtgcctccccgagccctcctttccctccgagccccggatccaggtgtcgcagaagcgcaagcaagaccagccaggagaccaaggcacctggggagcggacaggccatgcaggatgccaacgagtctgggactctggggcggggccagcactaggagagctttttccccgtgaccgatggtgacacacacacactgggtggtgagaacattccagaacacaccttggtggaagatggggagatggaaaaaagccactggaaggcagctcagcctgaaggcatcaagcagtggtggcgccacgcagtggcaggcgggagggctcagctcggccctggctcccacggccgggggctgtgtggccctgggcagacccctgccctctctgggcttagcttccacccccaaaaagccaggcgggggaccaggcatctacacaccaggtgtctacacgaggcgactgtgctggccgctgcccggggagagggggaagtggcaggcacccacctaccttccaagctctcctgagcatcggacgagaggcccccgtgccggagctggtcatgcaggaactggatgatggcgtaggccaggcgcttcttgttgtccatcttgagcccagaagaggtgatacctgggggtgcaggaaaaacccccatcaggccccctcacactccccactccaggcaccccaggcctgcccctaactagctgggcctcactttaagggtgctggctgatctcagctccaggacagcccaggtagaaaggccttaatacgcccatttcacagatgatgacctgaggcccagagctcaccaatccggctatgcacacagccagaaagtgtgaggccagcaggcaagcagggcctgccctagagaacccgcgtgctcccagggcctcctgagcactcccagggtggtactgaggcgccacggaggtcccctccgcccctgcttctggcatgaggtgggtgggggccagggatgctgcccagcaccctgcagtgcccaggacagctccactccagagaacgatccagccccaatgtccacagtgctgagagggagagaccttgtcctcagccagagccactgcccctttcctcaatttacctcttttgtggcatgtcagcaagcatttcttaggtacccaacggggccaggtgtgcctgccctggtatcactgtttcacaggacttgcagaggactccccccagggacttcttggggacccgtcttgttccccctgggaggcctacctacctcattccacctcagacccccctctagttccccctcggacaccctcctgtgcccccctcggacacccgcctggttcccccacctgacaccctcctggttcccccagcggacaccctcctggttcccccagcggacaccagcctggttcccccaccggacaccctcctggttcccccagcggacaccagcctggttcccccaccggacacccgcctggttcccccctcggacacccgcctagttcccccctcggacacccgcctggttcccccctcggacacccgcctgtgcccccctcggacacccgcctgtgcccccctcggacacccgcctggttcccccccggataccctcctggatgccccctcggacaccctcctggttccctctcagaaaccctcctggttccccctcggacatccgcctggtcccccctcggataccctgtcttgttcctcattcccaggacttgacagctgcttctgctcatgtctgtggtccctgcagtttcctgccaaagctctaaagggtgccagatggtgacatcaggagaggctgttctggaatctggagctgtagtctatggacaggtctttttttagtacaagacctttcacacaggtttcctgggtgcctgggccaacttggaggggcctcggccacagtgaccttcacggctctgagcaggaagccccgacgtgagcttcccccggggcaggctggccggctgccttgaggcgccagctcaggaaggcttggcctcactgtgcctccatttcccccgaaggctggcgatggtgactctaaacattcagatgtaacaagctgcgtggagaagcagccgcccccgcccccgccgctggagcagccaagttctgggctagtcacgtccacctgggacctgagcacgggaccttgtctgtgtctttgcagatggaaacaagtggagatgaggtcgctgtggtggccctaatgcagggattgaacatggccgcacggagacggccgcgtgaagacggaggcagaggctgaggccatgtggccacacgaagagaggtgaggctcgctggcccccagcagctggaagaggcaggacggagcctcccttggggccttcagagggaacgtggcccagcctgcaccttcatctcagacttctggcctccagaactgcgagggaaatcaatcttggttgttttaagccagccgggttgtgagggagaggccaggcggttcccggatcgtggcctgcaaagcctgtgagctcggacgggttgttcggcctgagcctccgcctccatgtctgtaaaatggggagctccattgtggctgctgtcaggggtcggggaaaaaataacccggaagctgtcagcccagcgcttggcgccctgcgatatctgttgttaatatcacgattctgccaggcgtggtggctcacgcctgtaatcccagcactttgggaggccgaggcaggcagatcacgaggtcaggagacagagaccatcctggccaaacacggtgaaaccccatctctactaaaaatacaaaaattagctggcatggtggcacgtgcctgtaatcccagctactcgggaggctgaggcaggagaatcacttgaaccagggagttggaggttgcagtgagctgagatcacaccactgcactccagcctggcaacagagtgagactccatgtcaaaaaaaaaaaatcatgattcctcgtggtgagtctcgtggcatagacctcggttggctgtttttggcagtgtgacctaggggaagcgacttaactctgctgagcctcagtttcctcttctgtcccccatggatggcgacagcacctccccatcggggggggggggaggggtacgagaccaggcgtgcacaacgctgagtgaacacccccacacaggcaggtacgtggacgggtgctggtgcaccctccgtgtccagatcaacacatgctgaggctattccagaaacgctgcccggctgtgcagtttcactgggagcatttggagaacctgctctgaggccagaagcaggcatggagaggggttgctgtggtgctggcgcatggaggggcagcccttggggaggccctggccgtgggatgggacccccatcctctgttcttgcgatgaggttcccttggctgggcctcccttctccacctgctccttccgggctgggctgggcagccgccttccctggaatccactccctgtccagggcctctggtgtctctgagcagctgggtcttccccatctctgtccctcactggctgacatacagggtggcggggctgtgtgtcaccggccttcctccggggccgggcccagcccgtgcatagtggaccttattcttagttgcactctgtgtgccaagacgcatgaggcaaggggcaggcctgaggcctcaggagctggggaaccaccgtgaggagaagcacaggtttgagatcagacgctcggattcaggctgggtcagacagggcctggccaagaggccgccagcctcgggatggacgaggaagggcgaggcctgaaggaatcttctacagtgacagctgcctctggataatttcttattcttctctgctctgtgcccagatctgctctccaagaagtgactaaagccacaaacacctacaaggaaactctgacccagcacccaggaggccacggctcctccttctgagccagcacagtgcaaggggtctctgccgccaggtcccactccccagctgggccccagggaccctctgcgcgcagccacgctgacaggcggctccaggggctgaatactgtcgtgtgctgaactgtgtcccccaaatccatacactgaagtcctaactgccaggaccttggaatgcgacctcacctggaaataagatcttggcggacagaatttggtaagatgacatcataccagtgtacggcgggtccctagagcaataaccaatgtccttataaaaaggggacatttggatgcagacgcatgcacagggagaacactgtgtggatgtgaaggcagaaatgggtgacgcggccacacggcagggacaccgagggcagagatgggtgacgcggccacagggcagggacaccgagggcagaggtgggtgacgcggccacagggcagggacaccgagggcagaaatgggtgacgcggccacagggcagggacaccgagggcagaggtgggtgacgcggccacacggcagggacaccgagggcagaggtgggtgacgcagccacacggcagggactccgagggcagaggtgggtgacgcggccacacggcagggacaccgagggcagagatgggtgacgcggccacacggcagggacaccgagggcagaggtgggtgacgcggccacacggcagggacaccgagggcagaggtgggtgacgcggccacacggcagggactccgagggcagaggtgggtgacgcggccacacggcagggacaccgagggcagagatgggtgacgcggccacacggcagggacaccgagggcagagatgggtgacgcggccacagggcagggacaccgagggcagagatgggtgacgcggccacacggcggggacaccgagggcagaggtgggtgacgcggccacacggcagggacaccgagggcagaggtgggtgacgcggccacacggcagggactccgagggcagaggtgggtgacgcggccacacggcagggacaccgagggcagagatgggtgacgcggccacacggcagggacaccgagggcagaggtgggtgacgcggccacagggcagggacaccgagggcagaggtgggtgacgcggccacacggcagggacaccgagggcagaggtgggtgacacggccacacggcagggactccgagggcagagatgggtgacgcggccacagggcagggacaccgagggcagagatgggtgacgcggccacacggcagggacaccgagggcagagatgggtgacgcggccacacggcggggacaccgagggcagaggtgggtgacgcggccacacggcggggacaccgagggcagaggtgggtgacgcggccacacggcagggacaccgagggcagaggtgggtgacgcggccacacggcagggacaccgagggcagaggtgggtgacacggccacacggcagggactccgagggcagagatgggtgacgcggccacacggcagggactccgagggcagagatgggtgacgcggccacagggcagggacaccgagggcagagatgggtgacgcggccacacggcagggacaccagattgccctcacgtcctcacaaggaacgagccccgacagaaccttgatcatggacttccggcctccaggactgagagacgatgaactctgtttcagctgcctggtctatggcactctgtcaccgcggccccagcaaaccgacactaacacctggcaagcaggcatctcaggacgcacctcagtcctcgtgacgactccaacaagcgggtcggccctgtctccagctgaactgagccaggttgggcagggacgcgtggtcgcatgcccaggatcacatagacaggagaacaaacgggctgtcatcacacggaagggagcagtgaagggcggtggccgagggacacggagggagggagcagctgcgcgttgctcactgtgctgcggtcccaggagccagctgcccgaggggcagcttcttttataagaaaacgacacttcctatcacgtctatgcaaatgtccattttaactttaagtgcacagatgtctaatggcccgagacacgtaggttaacacccgtgcacgcgtacacagaggccttcacctacaaccatccccgtgtagacagcatcagaggcagggcaccaaaagcattaaaaccatgcagatgacctacctgagcacttcgcagacctagaacgtcaactatgtaaaatacctgcccatgaacattggcaaactcctggcctcaagcaatcctcccaccctggcctcccaaagcgctgggatcacaggtgtgagccaccatacccggcctcctccaggaggcaaatgctgaggaaagccgtggattctactgacccactggattttgctgaagctgtgtgcgcgcgcatgtgtgtgtgtgcgtgcatgtctctccagattctgtctctctcccagaccagcggttctcgatggatgtgctgagacacttggtgttgtctcacatggagtggggggaggccagggacgctgctcagtgccctggagtgcccaggacggctccatcccagaggatgatccggcctcaacatccacagctcccactgggagaaagctggactagaagaggaggacctgaagagcctgtgggtgcaccaggcccttgacacaacaccgtctcatgacctcggcgcagtgacctatgcggcaggactggggatggaggtgttcactcaaggccactggagccacaggcacggcaggatccgcgcccggcaggcgcctgacctgcccccacactcaagatcagaggcgttcagtgtcttggttcccctaaaatgcctctacatgaggtgaacagccaccaccccctagaaaatgaggcgtgggctgcctgaccgcataacccaccccgcgccagagacaagcaaggcattggcccgccacgctttaaacagtggctgacgtcagactcagatgacaccggcgacgtggacctccacgccactaaacaagcatagtcccagacacactgggtgtgcccacagctttgtttccctttcagggaaagcaacatccatcagcaatcattaaaaaacaaaacaaaacagagagcaaaagagccagacccaaagcacacacagggtgtgacaccgactccatttctatgaaatgtccaggacaggcccatccagagacaggaaggagacgcgtgggtgccggggcttggggaggggaaggggagtgacagctggtggggaccagcttccttgctcccttttggggcgatgagacagctctggaaccagagagtggtgatggttgcacaaccctgtgaaggcaccaaatgccactgaatttcacggtgtggggatcacagcggtgtgggaatcacagctcaatgttttaaagggggagaaatctacaagagctgtgttttgtgtcgctggacagggagttacggtcttcctgaaagctcctgcgggatggtaatgagttttccgcccccatctcaggacacaatggacagcccagaactttgaggtctgggatcaggactgcctagagccggcgggcagccagtcccagaatccaaagatctcatgtacgacacatcagggcccacggcagtcaaccaccaccagaaagtgaaaccacaaaagctgacgtcatccgccccggccaacagggttcagagagcaaaccagtcaggtctcctgacccccaagcccaaggaaaacagacacatgccacccgaaaggtgaagatttttggtttacggagtttcttttgttttatttttaagcacgttttgacaacagcattacaatagccaaaagcaaacagcccaagtgtccacggacaggtgagtggatcaacacaatgtggcctagccacacgacggaacgctacgcagccatgaaaaggaaatcctgaccaggctacaacatgggcggaccttgaggacgtcgcactcagtgaaataagccagaaacaaaggtacaaaacctgtgtgactcccctcctaggcggtccctagagtcgttggattcacagagaccaaaagtggaattgggggtgccaggggctggggagtgaatgtttcatggggacagaatttcagcctggggagatgagaaacttctggagatgatggtggcgatggctacatagctgtgtgaatgtgcttaaagccactgaactgtgcatttataactgattaagatggtaatttttggcctggcatggtggctcacgcctgtaatcccagaacttttggaggcagaggcaggtggatcacctgaggtcaggagtttgagaccaacatggtgaaaccccatctctactaaaaatgcaaacaaaattagccaatcatggtggcgcacacctgtagtcccagctactcaggaggctgaggcgggagaatcgcttgaacccgggaggtggaggctgcagtgagctgcgatagagccactgcactccagcctgggtggcagagcaaaactccgtctcaaaaaaaaaagaaagactggtcgggcacagtggctcatgcctgtaatcccaacactttgggaagccgaggcaggcggatcacctgacatcaggagttcgagaccagcctgaccaacaggtgaaacccagtgtacaaaaaatagccggtcgtagtggtgcgcgcctgtaatcccagctacttgggaggctgaggcaggagaatcacttgaactcgggaggtggaggttgccgtgagccaagatcgcactactgtactccagcctgggcaataagagcaaaactccatctcagaaaaaaaaaaaaagaccaggcgcagtggctcacacctgtgatcccagcagcacttcgggaggccaaagcggggggatcacttgagcataggaattcaagagcagcctgggcaacatagggagaccccatctctgcaaaacattaaaaaattagctgggtgtggtggcacacatctatagccctagctgcttgaggggctgaggcaggaggatcgcttgagcccaggaggtccgtgctgcagtgagctgtgatcacaccaatgcactccagcctgggaaagagagtgagaccctgcctcaagaaaagagtttctcttcaaagtctggggtctttgagatgagggtcacacccaaccaggtgtctttagctgagaatggtgccgacatctcttcagaggtttcattggaaatgattctgtaacaggcggcatcaggtcaggatccccaggcagacacacctcacttggtgacctcagatttggaagaggcaacagcaagcagcagaaacaagacctgggccaggagcggtggctcaggcctataatcccagcactttgggaggctgaagtggtctggagttcctgaccagcctggcttctactaaaaatacaaaaattagccgggtgtggtggcgggtgcctgtaatcccagctactcgggaggctgaggcaggagagttgcttgaacctgggaggtggagactgcactgagctgagatcgcaccactgcacgccagtctgggtgacaaagcaagacgtcatctcaaaaaaaaaaaaaaaaaaagaaatcagacctggctgagtccccgcataaacctagaaggcgggggtcacagccccctcttacagagggagtgacaggcccagacaggtggcacacgcaagatcctaccagtgacagctggaactcggcttagcattccaggcacacagggcctagcacgatccacgctgaggggtgtggggggcaggggtgtgtgtgtggagggggatgtgcgttccttcgcagggaactaacacagaataaaccaagaaatctcatctttggttctttggtgtacctgtttccttctctcttaaactgaggtgtgagaactggacagggtggcaggtggctagggacccaatgagggttcagaaagtggaaagagttgcattcactgagtcacactcctctcttccagtgccgccggtgcctctgtaccccagggcttttgcacgtgctgctttccctcctggaacaccgccccccccggcccccgccgccacatcccagagaacctcttagcctcagggtctccaccctaccccatccctgttaccctgggacagagctgagcagaagtgccccagcttagacaccctgggctaggggatgccacggatccccaagagactctgtgtcccatgatcatttgctctactaaggtcccaggaggctgcacacattgaaattcacaaactatggaggattgcttgagcccaggagtttgaggccaacttgggcaacaaagtgaggccctgtctctaacaaaacaaaacaaaacaaaagataaaataaatccacacactaaggggagagggagcaaggaggtgaatcctaggagctggggaccccctgatttccaccctctgcccaatcagaagtttattctgctgtccagtgtgagcaggagcaagctcaatttttttcccaaataattaatgcaggtctgtcgcctgtggcactgtgggcatcttgggtggatgattctgtcctgcgcacggcagggggctgagcagcacccctggctccccccactgcacaccagaaacactctccagttgagacaaccacacatgtccccagacactgccaaaccgcccccagctgtaaatcactgatggccactaagtgggaagaaaggctggaagtcagtacaggtcagctttttctgtccaaaatgactttgctgtgagctttctgaaaaccttctgcttgtaggctattctgggtttcagaactgcgggtccacggtggaggactgctcaactaagggaagcacaggccctgcccagcatgtgacacaggccagtggtgccaggacctgtggcttctctgctgtccccaaggtgggggacatcatcaaacggttctcaaatctgcttcaacagccaggctttcccgtaagaaagttttctgctcttcagaggggggtccagcaagcatgaggacggcattttcctcaactgccgtttggcactcggtgtctttggaacaatcacaacttgtagggtttggctgtgggacagcatctcaaagaaggcctgctgtgtctcccaacagcgagggctttatggatgctcaggagccatggccgaggcctggtttcaaggcagaggccgcagaagtgagggtgggagggtgctggcccatgggggtggcgccagctccaatgttgggggcttcagcgtccctttcggctctgagccgatgactccacatcccaccttttcattttatcattaaaataaaaacaaaatcaaaacacagccacctcggtcggggcggtggctcacacctgtaatcccagcactttgggaggccgaggtgggagaatcgcttgagtccaggtgtttaagaccagcttgggcaatacagtgtatagtgagaccctacaaaagagactctaaaaaaaaaaaatagaattagcctgatgtggcggcacacactagtagtcccagctacttgggaggctgaggcgagaggattgtttaagcccaggagttggaggctgcagtgagctgtgattgggccctgcactccagcctgggtgacaaagtgagaccctgtctctaaaaacaaacaaaaaactcacaaccacctctcttccttatttccctgcccagaagggatcattcaatggaaaaaaatagaacatcctcgtaaactgaggtcgtcttacctcctcacaccccagtaggaagggcccgctcttacccactaccttctgtgaacactctgcccaactccatcccaaatccacggtgcttctcaccaacagcagggcaggagagccgggtgccctgctcctcactccctcttaggatacccgagttctagctcagtctcctgcccactccccacatcgaagcctacttccttctaaaatgccaccaggagatcgctgcacacataaaagctctcaactgctccttgcaaccccaggagtgtgcataggaggcctctcaccagctgggggtcatctgtggggcctacaccaaaccctgtacatgccactcaaactcaagtgctcacctcccctgcccaactccgccaggagagaatctagtattcctgcaaactcctatctctggcccagcatctcttacaaggctttctatctcttgacagacccatcttccctttgaacgccagcatctggcagcgtctaaaccctatggactcaggaaagcctgcgattgttgaaaaattcacagccacatggtcacgttccttggggaggccatttctctctgggtctctgtttccacctcagtaaaagagaaaacgggccaggtgcagtggggcacgcctgtaatcacagaactctggaggccaaggtggaggatcacttgaacccaggagtttgagaccagcctgggcaacacagtgaaaccccatctctaaaacaaaatacaaaaattagctgggtgtagtagtgcatacctgtagtcccagctactcaggaggctgaggtgggagggcctgagcctgggaggtcgaggctgcagtgagcagagattgtgccactgcactccagcctgggcgacagagcaagaccctatctcaaaccacccctttgttccttcagcctgtactgagcacttcctaccagagccactgttgggtcttggcataaaaaagaaaaaatgtagaattgagtaagacgacagctctcaaggatcctccaatctggggcagagctcacccgcatttggaatcattcacccttctaggaagatttaattataaacctcagctcaaatccttggcgtgcttacagctttccaggcacccagttaagtgctgtacatgcgatagcttattttaggggtcagcaaaggtttttctgaaaagggccagattgtcttcagctctgcaggcgttaagttccctatggcaactgttcaactgtgccttcttagctcgaaatcaactacaggtaacgcataaaccaaggagtgtggctgtgttcctacaaaccttcattcacaaaaacaggccagaggtggatttggccttctggtcagtttgctgataccttgcctggtttaatcctcacacacctgaggtggttactattataatccccattccacagaagaaaaactgaggcttggaaagatggggaccacccgagaccacccagctccgaggatgaaaatgaggagttctgaacccaggcagtctgacttgagaagctaaactccaaagtacccatttctctctgcacgaaattgggtgcacacacaaaactttgtacacgatttcccgggcccacacagtcccagctgcccatgctggtgaagaatcactgatctagggtagattttttttttttatttttgacagggtctcgctctgtcgcccaggctggagtgcagtggcatgatgttgggtcactgcaacctctgcctcctgggttcaagggattctcctgcctcagcctcctgagtagctgggattacaggtgcacaccaccatgcccagctaattttcatattttcagtagagacggggtttcaccacgttggctaggctggtcttgaactcctgacctcaggtcatcagcccgtatggtagggtttttaaagcattattgacatttaaagctggatcattttctggggtgaggccgtcctgggtactgcagggtgccgagcagcaaccctggcctccaccaactccaaaccagggggtcccccaaatcatgacaagcacaaatgtcaccaagaatccctggggcacagaattgttcctggttgagaaccactggtcaagggagggaaaaggcagacaaaaggaataatcagagacagaaacaaaagaaaatgggacaatcattcaacctctgaagggcacactacactgcaattttctggcacctaataacaaaaacagctattctcaagccagctctctcttatcaagttccaggcacctgatcaaataattgaatgtgggtttatcctcataatgaccctccgaggcatctgcttttacaactcgtttgcgaaagaaggaacagtttgctcagagagggaaggcgactcacccaggtttacacagcgggtgggaggtggtggtggacggtcctgaatcccagatttcccccacctctagcacgatatgcagaagaagactctaaacatgatataagacgaacgcctgctaattctttggagttctcagattccgctggaccctgcggctctccttctcctaggcagggacttttgaacaacgcccgttttacagaggggaaaactgaggctccgagaagccaagaggctgggcaaggtcacccaggtagggactggcggcgctggaaccagagttccgacttcagtccccacaaacgggggtccctgagtcacagggacgacgtttccaggcggttaataagagcggaacggcagcgaacacccagcgagcgctcactacatgcggggcgccttcccctcccgccgtcctcgccaccaggccgcggaccagcatttccaggacctggggcctggggaagggagatcagggctcgaagggcctgcccgatggcgcccggcctcagtttcccctccgcaccgcctactcacaggaccccgcgggtcgcggtgaccctggcctcacgatccccaaactcttacgagctttggggccccgtgggccccgagccgcagaccccagacccaccaggctcagcgcagtgcccctcactcacctctcaggcgaccgatccccgacccaccgacggttgcgcttgcgcaccgcggtgccgcccggccccggccccagggcgcgacgcctgcgcaaaagaaaggcgcccggagttgcttcccttctgcacaggcgcgttaatgatggaggcgggcgtggaaggaagtgacgcaacgtagaggcgggaaccagctggttgttagggcaactgacctctgcgacctaatggaggccggaaatcgggtctggtttgccctctagagcgggaatgaagcggtgcacggtggaacagtggctgactccagccggtcgccgagctgaccacgtggtgctgggccggccacgtggtgcagccgcgtttggacacctggactccagagcgtcacagctgcgcaatgaatgggagtcagtgttacccgcttactatctttgttcatttattcacccacccatctactcacccacaaatgcattctttcatgcagtgtgagacgtttgtgagtatagagccatttgtagacagcaggtgcctaatattcattcaatatttattgcaaagcagccataaaaaccagcaaagtgtctactctcattattttgcattggggtagacggactataaactaataaactagtacataaatagagaaacaaatttcacagcaaacactaagaaaaaaaaaatgaaggtagtgtgattgtcactgggagctaagtcgcatgggatgggtaggaaagatcatcctttacatttggatttcaaggataggaaagtccaaacggaccccaggcacagggaacagcgaaaatgaacgccgatgtaaaattaatcttggtgttgctcaagacatgtgatgagacatttccaaggacgacagaaaactgatcaccatctaagttacagttgccagaaatgttctcccaattcattttcgtcctactcaaaatacatgcacgattaatggcgtggattattttaatttcttttgcagaaataaaggaggtgaggccggccgtggtggctcacgcctgtaatcccagcactttgggaggccagggggcagatcacttgatgtcaggagttcgagaccagcctggccaacacggtgaaaccctgtatctactaaaaatgcaaaaattagccgggcgtggtgcgggcatttgtagtcccagctactcgggacgctgagacaggagaatcgcttgaacccgagaggcagaggttgcagcgagccgagatcgcgccattgcactccagcctgggcgactgagcgagactccctccagcccctccaaagcaaaagaaaacaaaacaaaaacaaaaaaagggaagaaaggaggtcggttgttttggtttttgccagtttaattgtagtacattgttttttctgggtgccctaacagttcaagacagatggttcaagatgttttttgttttaacccacaacactgcatgtaggtcaggctactgcactgttccacaacacctgttatttgacatgaatccgtttacttgcttttgtttctgacaaaaaaaaaaaaaaaaaaaaaaacttggcccggcgcggtggctcacacctgtaatcccagcactttgggaggccgaggcgggcggatcacgaggtcaagagatcaagaccatcctggccaacatggtgaaaccccctctttactaaaaatacaaaaattagccggggtgggggctggcgcctgtagtcccagctcctggaaaggctgaggcaggaaaattacttgaaccagggaggcggaggttgcagtgagccgagattgctgctactgcactccagcctgggcgacagagcgagactccgtctcaaaaacaaccaaagcaccaaaacttctggttaatttaattgattcgtcggattcagatgctggaaagtgggcctgggatatacagtaagcgatcaataataacactggcccaacacacagctataagaagcgaggcaagtacacattaacgcggtagcctgaagcccaagcgaagtctcagcgcaatgagccgcgcagaggctcagaggcgtcagcggcgtgcgcggtttccaaggaaaccgtccgtcctagccaccccagcggctctggaatggtagagcaagaggctccgcccacgcaccgccgagaccaataacggaccgggagggttacggcgagtgcgcagagggctccagcgcactcccggccctcctcctttagctgtgggcggggctcaggggcgcgtgcgtcctgccctccctgtgcgcgcgccgccccagcatgccccgggagcgcgggcggcgggccccttggtcctcaggcggccgtggcggcggtggcggcggttgggccgaggcaggcggcctcagtggccgaggtggctggacgcgtagcaggtggaaggagggagggagccgcaggcgcagacccacccgccatgaagccccccgcaggtaccgactaccccgctcgccggacccgggcgtcccctgcaccctcgctcctcccggggtcgcgacttgggcctaaggctggagcgaagcgacccccgagccaccctcggccgggctggaggggcagcgggggaggtggacgaccctgctctctcgtttgccgaatgaatgaaccagcttttccagcgcttcattcattctgcaaagttgatggcgcttcccttccggatgggtcgggccccgtggcggaccctggggaggccgtgatttaacgactccagtcccgttttcctggaattctagagccacagacagacattcaaaaattaaataagagaggatcgaagatagggagggatcggtgctctggtgcagataaacacgaacggggcagtcccagggacacgtttttagagagagggtggttcctggggggcttttctgaagaggtgagcgtcgacttgcttgattgggagaagcaagtgtcctgccaagaccggggaaggaggcgtcccgggaggagggaacgtgtttggagagcagaaagtcagtttggctggaacgtaacgaggggaccttttaattttgttatttatttactttgtctcccaagcgggagtgcagtggtgcgatcacgactccctgcagcctcgaactcttggactcagtcaatcctcccgcctcagccacctgagtaactgggactacaggcctgcaccaccacacttggctaattttttgtagaaacgaggtttcgccatgttgcccaggctggtcttgaagtcctgggttcaagcaatccacctgcctcggcctcccaaagtgctgggattacagacatgagccactgtacccagccaagacccttttaatttagaggcaaaggggcgatgtgacctgtgtactgtttatttatttatttgttggtttattttttgagacagtctgtgtctcccaggctggggtgtagtggtgcaatctctgctcacacaggctcaccgcaacctccgcctcccgggttcaagctatgctgcttcagcctcccaagcagctgggatttcaggcgcccaccaccacacctggctaatttttttttttttttggagatagagtcttggtccgtcacccaggctggagtgcagtggcgcgatctcggctcactgcaagctccgcctcccaggttcacgccattctcctgcctcagcctcctgagtagctgggactacaggcgcctgccaccacgcccagctaattttttttgtatttttagtagagacggtgctagccaggatgatctccatctcctgacctcgtgatccacccgcctcggcctcccaaagtgctgggattacaggcgtgagtcaccacgcccgtcacacctggctaatttttgtattattagtagagatggggtttcaccatcttggccagggtggtctcgaacttctgacctcaagtgatccgtctgcttcgacctccgaaagtgctgggattacaggcatgagccaccgtgcccggcctgggttttagaaggtcactcaggttgttgaagcaactccttgcctgatccttggcttttctcttgcccagccacactcccccagctctttgtccagcccattgcgatgagggtgataattgtaataatgatagtcagggatattcaggccttgggaaggaaggaatgttgtctgccttgtttgctactggatccttggcacaatcagtaaatatttacaggatgaactgacgtccacaagtttttcaaatcctaactcctgcaggagaattttctgacagttccagttcccatccatctccatcctttctgagcccctgaagctcttctttaccccacggtttaatgtagatccacagtcccttttttgcagttctaaaatcctaaatactctgtaaactgaaaggtttgccttaagtttacagcaaagtcatttggccagaaaatgacctcaactgaccgactgagagcctttctttttcccacttagcgaatatcattgattctcagctggggtgattgtgctacctctggggacactggacggtgtctggggacatttgtggttgtcacagttggggggcgctcctggtatggaatggatggaggccggggacgctgctcagcaccctgcagtgcccaggacagctccaccccagaaaacgatccggccccaatggccacagtgcagacagagagacaccctggtgcgtattcctgcatctcactgcagaaagagtaatttgatttcggagtgctgcctcagcctccctagtgatttggaatacatggcacttggactctattaatactgttctacaatggggggaaattctgaatgttaaaatgtccccggccccaagactttttggacaggagagcatggtctgtaataacagctacctcttgaaaactttctggtggtattcaggatacaagatgttttgccttcatacctcactgaattcttagacagttcttgttctctgcaccctgaattgttcccgttttgcaggtgggaagcctgagagttaatgtttcttgccagaatcccagaactagcaactggcagaggtggggtccgcacccaggccatctgacttcagcttctgcgttctgagctagcttgttgtgcctgccccagcctttgtaaaaatgcacatctgattgttagtgccactgtcccatccccttcctgtccctttccagggctccaccttgcactcaggattgaagttcaaagccttcattgtcatctacaccaggagttggcaaactccagcctgcctattttttttgagacggagtttcactcttgttgcccaggctggagtgcagtgctacgatctcagctcactgcaccctccacctcccaggtccaagcggttctcctgcctcagcctcctgagcagctaggattacaggtgcctgccaccacacccagctaatttttgtatttttagtagagacggggtttctccatgctggccacactggtcttgaactcctagcctcaggtgatccacccgccttggcctcccaaagtgttgggattacaggcacaagccacagcatccggccaagatggagtcttgctttgtcgcctaggctagagtgcagtggtgcaatctcagttcactgcaacctctggctcctgggttcaagcgattttcctgtctcggcctccagagtagctaggattacaagcccgcaccaccacacctggctaatttttgtatttttagtagagacggggtttcaccatgttgtccaggctggtctcgaactcctgacctcaagtgatccgcctgccttggcctcccaaagtgctgggattacaggcgtgagccaccgtacctggccaggcctgcctatttttgtacacccctggaactgaagatgatttttggatgagacagaaaccatatgtggcccacaaagctgaaaatccttggccctttgcagaactgtttgttggccccctgggtcctctgcagaactgtttgctggtcccctgggtcctctgcagaactgtttgctggccccctggaccctctgcagaactgtttgctggccccctgggccctgcacggttaggtgtttccaggtggttttgccaccttctctgtgccgagccgcactgacttcacatagtcgcccttcccgcagctgctctcgctgccaggagcccccgcctgccattcttgttttcaggctccatttacccgtttctcagagaggccctggtgtgagtggccgggccacatatgactcgcccgtagcacctgtgggtctggcacgaccacacgccaggctgactttcttgttgagttcatgaatggaggcctgcttgttccccccactgggtgtggggtgtggaagaagcagacagaagaagggactcctcccgaaaaccccccgatacctcacctttcccctctggcatggcaggagttgagcagtgcgtgggtggtcctggacttccccttttgtgaacacccaggggtttgtacaggctgatctgtgcatggtgtctccactctagggcagggggattttttttttttctctttgagatggagtctcgttctgtcgcccaggctggagtgcagtggcgcgatcttggctcactgcaacctccacctcccgggttcaagcaattctcctgcctcagcctcctgagtagctgggattacaggcatgcgtgccaccacgcccagctaatttttgtatttttggtacagatggggtttcaccatattgttcaggctggtctcaaactcctgacctcgtgatctgcctgtctcggcctcccaaagtgctgggattacaggcgtgagccaccaagcctggccgggcagggggatttttaacagcagtatcatctctattccgggctgatcgttctctgctggggccgtcctggtcactgcagggtactaagcaggatccctggcctccacccactccacgccaggagcatctgcaaccgcgacagccacatgtgtcctagatgtcacccagggttccctggatgggattgatggcagagtagcctcctgctctagaggactggtcagtctgtgcttccctacaagagccctggacctcactcttctggatgagaagcgggtgatcccttcctttccctctgccctcctgactttgaccctaactgaaccgaaagcagacccgcccggcactgggttttgtttctgcgtagcctgtgcaggagacatggcggacgcagcatctccgtgctctgtggtaaacgacctgcggtgggacctgagtgcccagcagatagaggagcgcaccagggagctcatcgagcagaccaagcgcgtgtatgaccaggttggcacccaggagtttgaggacgtgtcctacgagagcacgctcaaggcgctggccgatgtggaggtcacctacacaggtaagtcccaggcagggtctgtgcgtgggccgcaggtgccgagggaggtggcaccgcaggcgggagtagcccagcccgtggagccggttcagaacctggcttgaagtgtcaccagcaccctgcccctgagcacagggcagcgccacctgctcccaggctggtcgtggtggctaaatcagatggctgggcggaagcgtctggcaggtgctggtcactagaggtgtaggagagaggcagttcctcccgtgctccgctctgcttcacagcctcgtccattcaaaggactccctggttgtgtgatctgagagccggagatgagaaaatatgtctaaacagcacgcctctccagcctctcccagagccagcagccttgaaccctgaccccgtctggcctctttccctggcccgggaaggcgggtatttgtttctctctgaatgactgaacttggcccccttggcttctgcctctgcgccctccggcgggggtgacctcatgtcctcgggcgtcctcctcaccctcagcccgatcctcctcctctccttggggtccctgtgctcacggtgaggagtgaggtgcctagtgacaggggttagggacactgcttcccgagctctgcctaaggctgacagtgtacctgcctgaccaagagacccagagagtctccgcagagagctctgagtgaggcaactccccacccttccatctagcggaaggcctttttgctgggaaccatcgagaatccttgagttcaagcccagggcttctctcgtgttccaaggcatcccctgaaagggttggcctccgtggcccatgccatgaggcctccagagggtttgttgtctgggccaggggctggagggagggctgaagctccgcaagcaccccaagcctgcaggtcccgcagcccctgattggaatcctgaccctcttcccactccctctggcttccgacaagtggcttagagcccgtatgacctcggtttcccctcctcggccacgtggtggccccttgtccctcccgtaggagtctcatgaggctcaggtgataccagttccctcttatggcgcccagcggtgccaggcatcatttcccccgcccgtgccccaccttcccctcctgcggcctttcctctcctccttcacatggtggcgagactagcattaaaggaaactgaattcggccccagtgctcccctcggggcctttccgcttccctcagggtgacgcccagcatcctcggtgtggtcttcagcgccctgcaccgtctgtgcctggacacccagtctcctcgtgcctggcaccctcccccagccagggcctctccagccggcccctcgcgcccctcgccctgtgctctgctgaatgcctggcttctctctgatcacagattaagtccacttcgcccaggagcccttcctcctcctcctgtccccatgccagctgcctggattagtccctgcacggtactgacactgtcgtccctgcggtcacttgtctaatcggtcgcccgtaaatcccgagaggacagagctgattttctttctgtcttcagccctagcgtcaggcctggcccagagcccccactacaggcttttttgttgtttttttgagacagggtcttgctctgtcacccaggctgctgtagtgcagtagtgtgatcatggctcactgcagcctccatctcccaggctcaagccatctttaatttttggtagagatgaggtcttgctatattgcccaggctggtctagaactcctgagctcaagcttcctgcctgccttggcctccaaaagtgtggggattacaggcatgagccaccgtgcccagcccaccccccctctaaacacacggagcctcctccagacgtgcggagcctcctccaaacataccgaggcctggggacatttctgttgacccagaactgaggtagtggccagactgcaatttgaattcaggtctttctgctgcaaagtatatgcttttttttaaaaaaaattattattattagggtttttttttgtttgttttttgtttttttagaatgagtctcgctctgtcacccaggttggagtgcatggtgctgtcatggctcactgcagcctcaacctcccaggctcaagcgatcctcctgcctcagccttctaagtagctgagagcacaagtgtgtgccaccgtgcctggctaatttgtttttttaaactgctccattgagatatgatttgcataacatacagttcacccatttaaaccacacacttcaggctgggtggcggctcacacctgtcatcccagcactttgggaggccgaggtgggcggatgacttgaggtcaggagttcgagaccagcctgaccaacatccagaaaccctgtctctactaaaaatacaaaattatccgggcgtggtggcgcatgcctgtaatttcaactactcgggagactgaggcaggagaatcacttgaacccgggaggcggaggtggcggtgagccgagatcacaccattgcactccagcctgggcaacagcagcgaaactctgtctcaaacaaacaaacaaaaaaaaacccacacacttcagtggtttttaataaatttgcagcattgctcagctgttaccattctttcattttagagcattttcataaccccagagagaaattttatacccttaagtggtcacgctccatctcccctgtccccagccctggcacccacgcgtcccctcctgtctctgtggatgggcctgtcctggatatttcgtagaaatggcaccacatggccgggtgcagtggctcatgcctgtaatccctgcacattgggaggccgaggcagatggatcatgaggtcaggagttcaagaccagcctggccaacatagtgaaaccccatctctactaaaaatacaaaaattacctgggcgtggtggtgggtacctgtaatcccagctactcgggaggccgaggcaggagaatcgcttgaacccaggagttgaaggttgcagtgagccgagactgcaccactgcactccagcttgggcaacagagtgacacttcgtctcaaaaaaaaacaaatggcatcacacactgtgtgacttttgtgtctggcttctttctctgcatgtgacatcatcgggctgcatccacaccgcagcctgttccagagcctcattccttttcatggctgagtcgtgttccactgggcagaggccacatcttgtcagtccattcactcgtggatggaccttttgtcaattgtgaatcgcgctgctgtgagtgcacgtgtgcagattcctgtgtggatgtgtgttcatgtctcctggctggatcctggcactggagtcttgggggtcatgggatgactccattttaaagcttttttttttttctttttttttcttttttgagatggagcctcactctgtcgcccaggctggagtgcagtggtaccatttcaactcgctgcaacctccacctcccgggttcaagctattcccctacctcagcctcccaagtagttggaattacaggcacgcgccaccacgcctggctaatttttgtatttttagtagagatggggtttcaccttgttggccaggctggtctcggactcctgacctcaagtgatctgcctgcctcggcctcccaaagggctgggattacaggcttggccaccacacctggcctaaagcttatgcttttctagccactgacacttcctctactcaacctaaagcacagatgtgctcaggaaattgtaagtagtttatgcatttaaatgtgaccatcggcagctgcagctctctctggaatggaattccgtcagcctctgtttcgtcgtacccagctctgttgggtcctccttggcttggagggctttgagttgaatccttatttttcttcggtctgtaagatctccaaggacacaggcaacagcacctcctttctccatcccagggcccagcctggaggggacggtggcgtgtgcctctagtcccagctacttgggaggctgaggcaggagagagttcacggggggattcagcagacaggcctgggagaggggtccgggcaacacctgccagttgtactggggcctgttctcacacctgtctccctggtctcccctgttttagttcagaggaatatccttgacttcccccagcatgtttccccctccaaggacatccggacagccagcacagaggccgacaagaagctctctgagttcgacgtggagatgagcatgagggaggacgtgtaccagaggatcgtgtggctccaggtgagggggccctgcggggagtgcaaatagcctcccaagtaactaggattacaggcgcccgccaccacacccggctaatttttgtatttttagtagagacggggtttcaacgtgttggtcaggctagtctcgaactcctgacctcaagtgatccgcccacctcggcctcccacagtgctgggatgacaggtgtgagccactgtgcccggcccattttttgtatttttagtaggcacagggttttgccatgttggtcaggctgttctcaaactcctgacctcaggtgatccgcccgccttggcctcccaaagtgctgggatcacaggcctgagccaccacgcccggccacacatgtgcactttcatttcctttcctggccatcctagtgtgacccaaacaccccatccccacatggcgtgagctggcagggcctggcggcatggctgcgtgggctcctgctcccccggatgctcctcgcagtatgcagtggggcctttgctgttgatgtcacatgatcaggagagacccagagaccctcctgctgctgttcatcctcttaggcgaggacccctgggaatgtgctgatgtgtcccacagtctcaggatcatgcagccctagtgctttggtaaatccagatcagggtgacccatgatagccgtggattgttatttctttttatttaaatacagacagggtctcacaacgttgcccacgcttgtctcgaactcctgggcccacgcaatcctcccacctccactttccagagtttctgttgagacaatgagaggttcccatgcaggtgcaggaaagaatcgaatgcctttgccaactttgcccaggtccccagtgatgacgttttgcaaaactatggtgtcatctacaccccgataccgacctggagaccaccagcaatctaattcccattcagccatcgcactggtgaaggagctctggactgatgtcagtgtggggctcttccaaacaaagcgaacgtttgcacaggttttatgtagagacaggtcgtcatttctctgagataaatgcccaggagtgcagttgccaagtcacacgggggccggatgatcaggtttttaagaaactgccaaactgctctttggagcggctgcactggcccacgtcctacatgctttgatgtttttattccaggagaaagttcagaaggactcactgaggcccgaggctgcgcggtacctggagcggctaatcaagctgggccggagaaatgggcttcacctccccagagagactcaggaagtgagtgctgggtgtagggagtgctgggcgtgggcaatggtcgatcccggggagtgctgggcacagggagtgctcagtcccagggagtggtgggagcaagaagcgcagggcagggggagtgctgggctcggggagtgctcggctcagggagtgcttggggcatcaggagtgctgggttcagggagtgctgcgtcccggggagtgctggactcagggagtgcttgggcacagggagtgctgggtgccgggagtgctgggtgtgaggagtgctcggtcccagggagcactgggcatggggagtactgagctcagggagtgcttgggcttggggagtgctgggtggggggagtgctcggtcccagggagtactgggtgtggggagtgctcagtctggggagtactcggcatggggagtactgggcacggggagtgctcagtcctggggagtgctcagttgcggggagtgctgggctcagggagtactgggtgcggggagtgctgggcgtggccagtggagcttctgtggccccctgcccctgcctcctcgggagcgtccccccttcagggctgacccccggcctgatgtccatctttcttctgcctgaggacctgaactctggcaaggcaggtccacacagacatggggcgcagaggctcggtaacgaggggagcccctccacccactgcccggtgtgcctgatgtgggcgtctcaggggtgacatgagttagttggtgcagagctgggagcgcagcgctgaagtcaagcgtagtgtgttagcagaagcccagtgttcagcggcaccaacagagcagtggcgaccgccactggaaagatgcgtgtcacagttcccaggaactggcagctcgccacatgggaagcatggctgggtcaggaggtgtgctctgggcagggccttcgctggggtcccttgtgaaggcatgggtgtagcggggagtgggctcagggttggccggctggaccatctcagccagccctggcatgggggctgcccctcatcgggtgcctggccctagggtaatgggggccggtggatggtgccccagagtgtaggggctcgagactagttgatttgcacgtgaaagatgtttgcaggcgagctgttggctgtctctgggaggggccatttctcgagggccagcaaggcacccaaatgtcaaagcatcagaatacaggcccctgattcaccatggtgtgtgttcagtagaaaccgtgcttggaatgctgatctttccgaggccggccacttgggcacttgctgtcctgtgacgctgggcgccagccacagctaccagctagcctgcaatgacgcaggcaaactgaaaaccgaagttacatgagatacccaacacctcatatccgatagcctttgccttcggcgatctcaccagaatgtgggctgctgtgagttcctgagcacgcttaagacaggccaggttaagctgtgatgttcgctcctattaaatgcatttgtgatttatgatattcacaactcacgatgggattattgggacatacccctgtcctaagtcagggagcatctgtacaggaaagaaagcacacagttcaatcaggtcccaggctgcagccatagccccatggctgtccctgttccggttccataaagccaccgctgtcctggttagggggcgtctccaccttatggctgaggcaaccaagactcagagaggccaggtgggtttgtcagtgaaaccagcactgacgaaagcggagtcagggtccgtctcagtactcggggactgggggtcctcagctcagccgcagcggacaagagccagttatttttatttttatttatgcatttatttatttatttagacagggagtcacactctgtctcccaggctggagtgcaacggtgtgatctcagctcgctgcaacctctgcctcctatgttcaagcgattctcctgcctcagcctctggagtagctgggattacgggcacccgccaacacagctggctaatttttttttatttttgatagagacagggttttaccacattggccaggctggtctcaaactcctaacctcaagtgattcacccgccttggcctcccaaactgctgggattacgggtgtgagccactgtaccacagttatttttaaaaccccttcggcttgttgcatgcccagcatgtgtggccatgtgcatggtagaagccacaaactctcccacaagggccagcaagcaaggagggagcagaggcagccccgcctggaggacagaagcgcggaaaaggtgcgaggtccggatgctggcgagcagagttccagcgcgtccccgcggcccttagggccagcgctgtgtgctcattgagtctccagagccttccctggcatggctgggtttgttatgtgagatggcaagagggggagacattgggaattgcccagcatggggcctgttcccaggagaggcccagcaaaccctcagctggttctgaaccagggccttcctgacaagatacaggctccctgcaaagtcctgggcacagtttccccctgctgccgccctctgtcctgcggatgagcatttctgctctggccccatggagctgggctccagacccgcctggcggagcttccagcaggagaatctgagtcaaagtacagccctgctgccagcctgtcatgtgtcatgtggcctcaagccaggtccttgtcacatagtggtcacctcccagccttcaaggccaccagagggaccactcaagattcagttcctttgttgatatcccatatcaccagggtcgagttttagctgtttctaaaaccagctttaccagataaggggtaaaatgttcaaaagctgccagacacggtgactcatgcctgtaatcccagcactttgggaggctgaggtgggaggattgcttgagcccaggagttcgaaaccagcctgagcaacatggtgaaaccccgtctgtaccaaacatacaaaaattagctgggtgtagtggcgtgtacctgtagtcctagctactcaggaggctaaggcaggaggatcaattgagttgggaggttgaggctgcagtgagtcgagatcatgccactgcattccagcctgggcaacagagcgagtccctgtctcagaagaatgttgaaaagcttaggctgcaggctctgaaggtgattccttaatggataggagggtctggagcactcttggccagggccacacctgacagaccggagcacatccctgaggttgcccgaggtcacccagctttggatgccgcagctggtgttgaaatccacactgcgcagcctcgtggcctccgtgtctgtctgtcctccgcctcccgtctcactctttcctcctcggttgcctcttctttcggcctggttcttggggaaatccctcagccctcggcgagagggttcccaggcgttgcgtctccccgcggagcccgccccggtctctccctcccctcacgccccgcctttctctccagaacatcaaacgcatcaagaagaagctgagccttctgtgcatcgacttcaacaagaacctgaacgaggacacgaccttcctgcccttcacgctccaggagctaggtaggggccgagcagtggggcacgggtggccatcggtcctgggactcagtgcaggcctgccaggccctcgggggccgccgcttcctcctgtgggcttctgtgctgaagggcggcgggaggccgaagtacgtggacctgaccgccctgggctgaggactttcctcaccggaagcgctccagggccgtttacagccaaaagctctgagccctccttggggagggccatggtctgtcccaccaagattccaccctgatagaaaatgtccctggcagtggcggaagcccaggccggacggggtggccaagggtgccagtctcagccatggccctgagggaaccacaattttcccttgagaccccacttcctgcctgcctttatttatttaatttaattaattaattaatttattttgagatggagtcttgctctgttgcccaggctggagtgcagtggtgcgacctccactcactgcaacctccgtcccccgggttcaagtgattctcctgtctcagcctcctgagtagctgggactacagacgtatgccatcacacctggcaaatttttttatttttagtagagacggtttcgccgtgttggccagggtggtctcagactcctgggctcaggatctgcctgcctcaacctcccaaagttctgggattacaggcatgagccaccgtgcccaggcaggccggaatattctgatgggtgctatagaatataacctccagttctagactctgaatgtagttgcctctgaggtggtgggtggggacaaggccctcatggccggaggcctccgcaggtggcttgatgtgtggtcacctgggcgtatgtttcctgagggaacactcgcaggtcgggcactgccaagcttggctgccagccacttgctcagccctcccgtgtctcgggcagcacatcctaccctcagcttctggcactcaggagagacgacgggctacaatctgccgtaaagcacgtttcccagcctgcccctcagtgggtgcactgatcacccgcaccattcccgcagccacccacgccatcccgcggccacccgcaccgtccccgcggccacccgcaccatccccgtggggctgcttctcctgcctgctcgtgttagcaagcagaaggactcggtgcctgatgttctagaagccaatgccatggcaccaaggatttgaggaaacaaaagcttctcattgcaagtgactcccaaggagactgggcgtccagctcaaatctgcctcctgtgccagctttcaggcagtactttcatgagagaaggtgcagaggtggattctgggattagcaggtgattgttggaaggaaaggggaggtctggaaggtccttgggcacgcacagttatctgtccgtgccagctcgtgggtcctgggtgtgaatcctggggaagtctgtatgaagcgcggtggaagttcagttggcatcagccagctggttctgcacagactctgctggctcatgtgggttccagccggtttcagccagttttgttcttgtcggcgtttcagctgcctgtttcttttcacgtttgccatcctgcaaactcgaatgtttgtggattttggtgtctaactctttggggtgccgttccatttgtcgggcctgaggggtctcccgtgcaggtggcttgagtcccatgtggccaggtgacaccgtcatgcgggtggctagcgtgttgggtgacagtctccagggctgtccgctgctgctgccccgggacctgtttccctttgtggtccgtcatttctcaggagacgccttgcgatggtcttagttccttttcttctgcttacaacagaaaacctaaggccatgtagtttataagaaaaggaattaacttgtcacagctctggaggctgagaagtcccaggtcgaggggccatatctggccagggccttcttcctggtggggactctggagccctgaggcggccagggtgtcacatggcaaggggagggggctaagcgagccggttccacccaggtctctcctcctcacaaagccccaggccctctgccacattaacccatctgtcccttcatccatgaatccatgaatggattcatccattcctgaaggcagaggccacatgacccagctgcctcttgaaggccccagtacctaatcctgccatctcccaataccaccatctccaacaccgccatctcccgatacccacatctcccaatacccacatctcccgataccgctacctctcaataccgccacctcccaacactgccatctcccgatacccacatctcccaatactgctacctctcaataccaccacctccaacaccaccatctccaacactgccacctccaacaccaccatctccaacaccgccacctccaacaccgccgtctcccgatacctccacctccggacacccccacctcctgacccacccacctcccaacaccaacacctcccgacacacccacctcccgacacccccacctcccaataccaacacctcccgacacccccacttcccgacacccccacctcccgacaccaacacctcccaacaccaacacttccccacacccccacctcccaacactaacacctcctgacacccccacctcccgacacccccacctcccaacaccaacacctcccgacacccccacctcccgacaccaacacctcccgacaccaacacctcccgacaccaacacctcacgacacccacacctcccgacaccaacacctcccgacaccaacaccttccgacacccccacctcccgacaccgccacctcccgatacccgcatctcccgacaccaccatctctggcattaagttcctggtgcattttggaggggacgcacccaaccagagcagagacctgtgagtgtccatcactcgcacattgtcatacactagttgccatgtccatggatgacttctgccgccctcaccctctgggcatcagtcatcctgccgtgactccgaaccttccctccttgcctgtcttcttactgatttgtttctgtccgtgtgcatgaggcttctgtcttattcccgggttatcattcattatcatttatcccagtgctcaaatcgtcccacatggaccctcaggagtccctccgaacaatccctgtgtccttgtaatgcacctgctgtcctctgaacctgctcttactgtggggcacatggtaccgcaggctcggcctctgagcccgcgcttactgtggggcgcgcggtaccgcaggctcggcctctgagcccactcttactgttggacatgtgatgtcgcaggctcgtcccatgctctccctgccccagccctcagatgctccatttcttggaggagacctggcgcctttgagtggagggtgacttaggcaccggatgtgttcaccactgccagggagcagcattcctgggcaccgttaacagttaggaagcagacacgcatctctgcaccacacatggacacacacactcttctattctgtgtctgtatatcaaatccacaagtgcagcggggcatgccggcacacacctgaggtcccagccactcgggaggctgaggcagggggattgcttgagtctgggagttcagggccacagtgaacgtgaactatgcattcgtgaactatccattgcagcctgggcaacagagcaagaccctttttctaaaaaaataaaaacttccaggagtccactttgcagcttctcttccagtccagcgctgctgggccccccagctgtctcccttgctgtcctttaactcccgtctccgaccgccagccgtcactcctgggtgacacactgtcgagatggagagctgctgtttgaaggcccgtggtccttggaaaggacgatgtgcaggtcccgggaggcctccccctcatgctgcagtcactcggcagacaattgccaggcccacgctggtgctggggtacaaacgggaaggcgggggctctgccggccacaggactctcagctccctcatcaccacccacacccacgggctggcctcccaaaatttcccccatctgcctctggccccccaaccggatcattctttccacccttgcctccctggggtccccgtgagctcccgatcattctttccacccctactgccctggggtcggggtgagctcccaatcattctttccaccctgaccgccctggggtcggcgtgagctcccgatcgttctttctacccctactgctctggggtccgtgtgagctccggatcattctttccaccctgactcccctggggtcggagtgagctcccgatcattctttccactctgaccgccctggggttgaggtgaaccagtctttgcattgaagctgcaagcctgaggcacggtggccctggcgtctcccgagccatgaggtaggaaccccagagggtttcagtccgggatgctgccgcccccacttctcttgaggctgtcgggcaggggccaggtgggagggtgtggctgccgggcagcggggtgaactgtgtcctgccaggggttttgtgggtggagaagggacagcagggctccagtgagaagctctgggagtaggaattgggtctctctggagggacacacttgaaagtggttgagccgtggggctgcgtgctgagatctcagctctgagcgggaggctctgcctgggggtggttcttcaggaaaagcaaagcaggacctccctctccacgtggggcctccctctccgcccagggcccagcgtgctcagctctcctgctgtttttgtctttgatgggaggcactgcctctaacgctggtttccttgtgcagtggccgggccacccttcccgccaccctcctcccttcacacatgaggttggtgacggcgccctggaagcccacgatgtccgggggttgggctggatttagctttaacctctctggggcaggagatcctgctctgaggatgctggggggtttcctggtggggttagaggcgggacgtgagaaacgtggcaggtggtggccaggctgtgggggagccagggtatttcttgatggggttagatgggggatgtaagaattgcagcgggtggtggccaggctgcagctgctcgctgagggcccccttgtagctttccaggcagaggggaagcccaccccttccctcacacgctgtgtgcaggctgtgggcccatcagtcctgtcaaagccaccctggttctgtccccataggagggctccccgaggactttctgaactccctggagaagatggaggacggcaagttgaaggtcaccctcaagtacccccattacttccccctcctgaagaaatgccacgtgcctgagaccaggaggaaagtggaggaggccttcaactgccggtgcaaggaggtgagaaggcacggccagggggccccagaacagtgggtctggagcttgtggggcccgtctgctccatgtgtgtgaggcacctccaggctttgcacttggatggcctcccaatctccctggccaggcccagtggccagcagaggcctccctgtggggctctgccgtgccctggaggtgtctgtgctgggctccacccagaccctggggccacagctcagggcccagttcatccttcccaagctgagcctcctgctgctgctctgagcatctggccgcgcacacgtctcgtccctcccttatctggagccgcccctcaggtgtgtcagcccagatcattccttttgtcttaaatgatggtgcccggacctgagcctgggtccacaggtgggttgtgactgggctatctcgctgtgactggcgtcagacggccgttcccacagggacacatgtaactgtccacggcgccatggtgtggtcggtcaggtggtctctgcacgtctcccattcgccatctggaacaggcagaggctctaggagtgggcctcttggtcccctgacgacaccaagttggtgcttgtgcggctggcaaaagggggatacacgctgatcactgcaaagggatgggcgggcactgatcactgcaaggggacgggcgggtgcccatcactgcggggggacgggcgggtgcccatcactgcggggggacgggcgggtgcccatcactgcggggggacgggcgggtgcccatcactgcggggggacgggcgggtgcccatcactgcggggggatgggcgggtgcccatcactgcggggggtgggggacgggtgggtaccaatgggggtacaggtgggcaccgatcactgcaaggcaggggggtgctcctcgctgttcagggaccgggaactcagtctgctcagatggggcgtggcctgccctctacatgttggctatgaattcatgttgctgttaagcctaagtaggtggacccgtggactgggcacacctcgacttccccactgcgccttagaaggtcaactgggcaatcccgtcctggtccccaggcttgggtcctagtggcagagtgagggccaggccaagagggcgcacacgggtgggctgagttccaggtcccgggggatgtgccgcctcagagaccttgctgctggcggtcggcctggcccctatttggctggctgctctgcacgcacctgctggttacagctgggtttcctgtggacccagctggtgggcacatctgtcctgaacaggcctctgtttctcctcgtaaacgcctcacgtggctttcatgcgtcctcccccacccccactggcttggttggcagtgccagtcctcagaagtgaggctgtgtgcatgtcatttgctggtggcgataggcagagcccgtgagactgggaaccaaggcctggacatggaggtgtccccacatgcagcagtgatgccctcggaggctcctcggacagcccctggtccccataccacgttccgtgtgaggccttagagtcatctgcaccccttctggttccaaaaaggccttgggattatgataacgctggtggcatgaccagaggagttgtgtagtaacacaggccgagaggggcagggaccggaggtcagacggagctggatatgagcctttggccctgggacagggcgtgctggccctggaggtggagggagtggcgcccctgggtgacagtgtggtggtgtcggttgcaggagaactgcgctatcctcaaggagctggtgacgctgcgggcccagaagtcccgcctgctggggttccacacgcacgccgactatgtcctggagatgaacatggccaagaccagccagaccgtggccaccttcctaggtagcccttccttcctcctccactggggtccctgtggggaaggttctcagggtcaccccaggggacagtcggtgctacccctagagccttgtcctttccctccatgaagagggacttctgacgcctgccctggctccctcactccccccgagggacccttacagaacagggaagcgcccgggccctggggtcagtcccatgcttgcacccggccccgccgccccctcaccctgagcgtgaggatgctcggcccctcgaggggttgccgggaactgcgggtcctcccttccaaatggggagcctgacgaagtcgcggccgcgggcgggcgagcccagagccatggaggagcccgcgaggcgagaggcccacctttctgccctccccgcagatgagctggcgcagaagctgaagcccctgggggagcaggagcgtgcggtgattctggagctgaagcgtgcggagtgcgagcgccggggcctgcccttcgacggccgcatccgtgcctgggacatgcgctactacatgaaccaggtggaggagacgcgctactgcgtggaccagaacctgctcaaggagtacttccccgtgcaggtggtcacgcacgggctgctgggcatctaccaggagctcctggggctggccttccaccacgaggagggcgccagtgcctggcatgaggacgtgcggctctacaccgcgagggacgcggcctcgggggaggtggtcggcaagttctacctggacctgtacccgcggtgggtgagggcagcgggggcggggggcgcaccccggccctgggtctcctcggagcccggtgtgcccgtctgagatgggaaggaagtcgttgcctgctccatggggcctcggggatgaaccccgagacgtagcacccgtgggcacaccacaggggccgaaaatgcagctgtccccgtttccagtctcactcagccaccccgacagggcgcagctctgcccaggccggagtcctttaggggagggatggcagccggggcctggccgtggttttcatgctgccctgcgccaagccacctctgctgagagggaggtttagaacctcagaggtgcccggcggtctgggttagcagtcaggtgggctgagggatgcggagtcagggactcttgcggtgtctctagtccctgcggggcctgacgctgcctccctccccagggaaggaaagtacgggcacgcggcctgctttggcctgcagcccggctgcctgcggcaggatgggagccgccagatcgccatcgcggccatggtggccaacttcaccaagcccacagccgacgcgccctcgctgctgcagcatgacgaggtggagacctacttccatgagtttggccacgtgatgcaccagctctgctcccaggtgggtgcgggcccgggcaggggcaggggcaggggcaggggcaggggctgcctgtggtcagcgaggcccaagcctggggcttcggcttccggctctctctgcacccgtccggtggctccttcatccaatgccacccaaagatggtgactccctgtcatgcccgtgtcctggggctgccccagcaaaacaccacagaccagggcttacacaaggtgcgtgtatttcctcatggtcctagaggctggagtcggaggtcacagtgtcagcagggttggctccctcgaggtccctccttggcttgtggccgccaccacctccccgcatcctcatgtggtcgtccttctgtgtgggtccccatctcgtcttcttacagggaccccagtcatgccggatcagggcccgcccaacaacctcacttgaccgtagtgacctccttagacatcctgtctctaagtagtcacatcctggccaggcgtggtggtccacgcctgtaatcccagcactttgggaggccgaggtgggtagatcacctgaggtcaggagctcaagaccagcctggccaacatggtgccatcttgttgcaagcatctgtcctagcacacagtcagcaatcgctcctcagaaaggctctgtcctatgaagtcactgagaaccctgagaagtgcatgcagacctgtccctccaaggggaccctggtcacgtgttcgccaactgatcattccagaaccttactgtgtgtgttttgggttcaagacaccttactgctgtacagcgctgacgggttcacgttgaacacatggctggtggctctgtcacccacacctgagcacagcttgcacacacagggtgtccccatgaggcacatcatggcctcctggtgctgaaggagacgagacagtgctctgcacaacgcttggggccttttaaacacaaaatcaccaagagcagaaagatgcaaacaccgtgcccccactagactgagaaaaggacgcttgctcataaaatgagccgaagtgagaagacagagtgcggcccttctgaggaccgtctgctcaggggcgccgcagtgctggcctctggggtttttgtggatcttagtaggcgagtttgaaaacacggagtccaggaatgaggatcgaccgtgtgtccacctttcctggcttccctgccacactgtttgcacagcactcgtagccagcacacgcgtgtgcacatccacacaggtgctcacacaggtgcccacgcacgtgcctgcaggcctgctttgcatgctgctttctgcgtgtccctggcgcctggcacggcgagtcccttggtgcattccgtcgggacaaggagtgtggctgcgtggtccttggaacagaaaagcctcggtgttgcagagaggaccttgaggatcacccaggagttccctcgccgttggctgcctgccatggttccagcgggactcagtcaagggctgtgcttttagggaaggttccacacacacacgagcagggagatgcagcatgcctcacagcgtccccacccggacctggccgtccccaggtcccaacccctcggggtgcggagctttcagggagcagcagctctgtggctagaggagaagcgtgggtggcctccagggacggggtcatgtggccggcatcttcaggtgtgtcctgctgccaccggcagccagcagcagcccaggggcctccgggtcccggtcgttttccagttttggggtgggagggccgggcccagcgcatcacctgtgcactcgccctgtttgcactgtggcagctgacacgggccaggccggcgggaacgggctaggcaggacctgggcactctgaggctctgccccatccctgcaggcggagttcgccatgttcagcgggacccacgtggagcgggactttgtggaggcgccgtcgcagatgctggagaactgggtgtgggagcaggagccgctgctgcggatgtcgcggcactaccgcacaggcagcgccgtgccccgggagctcctggagaagctcattgagtcccggcaggccaacacaggtgcacccgccccgtccggggaagggtgctaacctcggggggcggcacacagctggggcctggcatgtgccccgggtgggggtcggagctctgggcagagtgggccggggcaggtgcagaggccagctctctccttccctcccgcccaggcctcttcaacctgcgccagatcgtcctcgccaaggtggaccaggccctgcacacgcagacggacgcagaccccgccgaggagtatgcgcggctctgccaggagatcctcggggtcccggccacgccaggtagccacccttgagccgggcacaccctggaatttggagcctcagctgcttccctgggaaggtgaagggagttggtccccatgcttcacttagcaagtgcaggagtccctgctggggagccacggagcgcgtcccaggctcctcgggggacagccccagctgagatgcagctgcaggcccagggtcggggacgggtgtgcggccccagcccccaggaggagtgtgttccctggagcctctgctttgaatgaagctggcgttttcctgattgaaatgtatgacacatgctttgtaaaaagcctggagaagtacaggaaggcctaggaatttccgatcctaatgatgagaagtgggccctgtttccatgctcacctgttgtcctgtgtgcatgtgtgttcacacacgcttgcgaggatccagaatttggaaatacagcatgattttaacatgggtggtgttttgctggcttaacactccatagacttcaaaaatctttccaaaagcgttttcagcagcgtggcctgtgatgttgcgtgggcgtgccttgctttattgacgcagtctcaaaatggggactttgctctgtggcagctgacagccccgttaaatgagctcctgtccttccaggagagggggcggagacttgtggccctcgctttgtggctgactctggttctagaagtatccagctggtctcggccctcaccgtgatcctccagcttctccctgttccgggcaggggtctcaggagtctggctggttgtcttctcctggaggaggagcatggggtgggggctacagcgtgaaccctgccatgtgtccgccccaggaaccaacatgcctgcaaccttcggccatctggcaggtggctacgacgcccagtactacgggtacctgtggagcgaggtgtattccatggacatgttccacacgcgcttcaagcaggagggtgtcctgaacagcaaggtacgcggggactggggacagggagggcgtcctgaacggcaaggtacgcggggactggggacagggagggcgtcctgaatggcaaggtacgcggggactggggacagggagggcgtcctgaacggcaaggtacgcggggactggggacagggagggcgtcctcaacagcagggtggggccgagaaaagcacacctttggcctgggcctgggtgtgccgggtgagccatcccggccgaggcacctgctggtcttggtgcggtgctgcccacagctcctccctgggccctgcaggaagctccacactggcccctcaggcctcgggctgtgagtgctgggagctccgtgtcttcccatacgagtccttccgggatctgcgtgatcggcctcagagccatgggctgagacagacccttctctggagaaggcttggcgtttgccattcatttgctcctccaacctccagtttcctcactatgaagtgcggccgttacgccatgtgagcctgtgcctcccgctgacttggtgtgacccaggctcgggacagccgccagagtccctcacaaggaacaggtggctaccagctttgagggccggccctgccctgcctgggtgcaacattgcactgggcagcctgcaggtacctcggagccaccaagcaggcactcagctgctccctttatagaggtgcagaggccaggacctgggggagcaatggtccgacaagccccctgtcttcacagcccagcagggacctcccccctcctgaggcagcctccagcagctccccctgctgctgaggtgagggggtcccacctctgaggaccggccgggggctgtagaggtggagtcccccgggtgggagctgggactgtggctccctggctctgcagcctgcagtccgcgcaggctcctgcggggctctggggcgtcggggtctccttggtggctggcaccggcgcctcgcagtctcatctgcctcacctgcccgtagtcccgcagtcacagggctgggctcaaacctgggcctttagggcggcccagagcgcgagcggcttccacattgtccagccggaggctcagccacttctgttcatgggctcagcctgggatttcagtgggggctgatggcgggagccacctcgggagtttggggagttcggggctctgctggcccctcagtgcacacccccgctctgagattctgatgaaaggcacctgcgctctcccacctgtgctgatgcaggcggcccccgggcctccctgggaacctggaaggggttgctccgaggcccccctgggcgagggtgtgcagactcctggggtcctctgccttcctccctgggtccccacccggccacagtgccctgtctcctcggcaggttggcatggattacagaagctgcatcctgagacccggcggttccgaggatgccagcgccatgctgaggcgcttcctgggccgtgaccccaagcaggacgccttcctcctgagcaaggggctgcaggtcgggggctgcgagcccgagccgcaggtctgctgaggcctggcactgcgactgcccagtctggcctgcgctcccgccgccctggtgccttagcccccggcacaggatggggcaggctctggcacagtgcctgggactggcagggtggctgagcggctgtcttgcctcttgtcattgtctgtccccacccggtcgtggcccacccggctagagacggcgtcctcaaggcatctggagggctttcgtggctgccagggcctggtctttgttgcactaacacgtctcctctctgggaaacgtcccttgtcaggagacggctcttctttgaaatgaggtcattaaaaggaaacagaaaaagagagaggctccctggcctggtcactggctcctgcgcttttttggtccgaggacggtgggacggcgggtcagggtccagccctcgggctgttgccacaccaggccctggattggggctcaggtccttgtgggggcggggggtgggggagtaaagggctgggaaccagttctgccagccaggccggcctggggggtctgagagacttcggcttcctgcatgcttctcacctgttgtcattctggaacattccccccgccctgctcagctctggccatcaaggaccaggctccactggtcagagagtctggaaagtcagggcaggccctgtgcgcacaggcagccggggcggggctgggggtcagcagctgcccaccctctcatccacaggggaaggccgggctcactccagcttcctaggcagagtctctgggggttcctgttggacacaagtgaaccaggtgaaccagggcagctgctggaagctcggccatggccctcatcctcatggccttggggactgcctgtgcctgccctccctggcggccccactcccctggctgtgggcaacatggcaaagtcttgatcgggggtgcagggtcgggggggcgcttcctggaccctccaacagtgctcagagatgcctcagggatagctgtcggctgtgtccccacctcccgagcaagacaagtggatgctccccgtctcttcagtcccagtgctctgatgttttctcccgcgactgtgagtttctcaggagcccccctcgtgccctgggagcgtccctccccagtcttagtcctccacgaaggacgctggtcagcagaacctgtgaccctgcttcccgaggcctatgggtggccagacatccgcctcgtcctcacctccatttggacaggactccgagggctgtgccatctgcttcagcccctcctgtcccattcccacccagcccaggtcagtgtggctgtggccactgccatggggcctgctttgcaccttacgcacgcctggctctgctccatgcacctgcttctgtgtctttccaactctgggggctaaggggtgagtcttgtctttgcagagctggacggcacagcctgtggccaggagggttatgccagcgaggcgggaatccataagtgggaacaccacagtggtcacgtttcagatactcacagctcagagcgggtcccatagcttgcacctgaagccccaactactcaggaggctgaggcggaaggattgcttgagcccaggagggcaaggccagcctgggcaacgtggcaagaccccatctctaaaaaaaataagttcggtgggtgtggggccagtgcctgtggtctgttttttgggaggctgaggcaggaggatcgcttgagcctaggaggtcaaggctgcagtaagccgtgatcccaccactgcactgcagcctgggcaacagagcaagactgtctctaaaataacaataataataaaatacctggggttcagaaaagaaaagctggaaggcaaagccgaccgcactgggcagaggtggagatggcaagtctgggggctccctcatcttcccctgccccgagccctcaggtggcctccacctggtccccagcgaagtcccagttgtgcaagagcaccccagctgggccctgggccatcacagccttgtcacacacacagcctggcccatcacagcagagctggggtcacagccttgggctgctgggccgtgggcggatggcctggaccatccacaccccactcccctggaagtcaccaactgggcttagttgccggataccccaggcagccccccgcggtgcttcgcaagttgggccgcctcccccagcatgtcccctgctctgtggacacccagggatgtggaggtagtagcacagagtctcggtccagggccctgttccccagggagctgggcgtcctcagagccttcccaaatgcccacaccgggggcacccgggtttccccaaacactccaggacagagcgggggctttgatcacagggagggggctgcagagctgctgtgtctcctggctcctctgccccatgctccccactcagggctccagcagtgggctcagaggacagtgtggcattagcatcccctgcccgtccaggttgtcactctccttggccccttgctgctccccagtggaaaaaaaagggggaaataaagaatcgtaaaaaatacatatattggaacctgtatgttttgtgatcttcgcaacatttctctgtaaactctccttctttaggtttttgacaaaacctgaatgcagaagtggtctcctccccagtcacccgtccagcccccgtgggctgtccccaggtgtccctggctcttcatccccacaatcctgtccctgcctgtgctgcctccaacacacgcgccccaggctttgtgcctgtggttccattttggtccttcacgaagtatttctccaaccgagaagctgctgggatctctgtggttggtggccccgagcggccccactcctctcaaggatgataccagtggggccgttgtaggcaggctccatgctgcgggctgggcaggcgcggtcgtccccatcctccccatgggacttgtgttactgtccccgtgtcccagatggggcatctcaggagcagagccagcgtcccccctcctctccccaatgagcaacaccggctgaaggccacagccttgaaagggacaggggcctcactctccagggctgtccctacttcaagggacaaaatgttttgtgaaactcagttcgattctgagattaatggccagcttgcgggtggtttgagccctgggctggaaggcaggaggtctgggttcaagtctccaggtagacagggcccagggatgagttccagcatgggctaggggccagggtgctgcccacgtggctccctggggaactgggctccctgtggccatgcagagagctttctggcttttccaggctgcaccagaccggtgtgatgctctcctcttcagaccccagactgcccttgtgtgttccctcttgccccatcctcagctcaggaggtcagggagacggagctctgtcccaaaggccatcctgtgcccccggccacctctcatcgttggtttgcggatgggctggtgacctattttggagcacctacatcagtgccgtcctccagtctgactcggtttgaacgattagagaattttatttttccctgaacttgaaattgggaggagggaatgctgtcggcacgtggaggtgcttggagtggggcctgccaacccggaggacgctacggctgtgatgaaggctaccccactacatcgtccaagcacctccaacccagtttacggtggggtccggacctgcccctgaacttggcggttatgtgagcctataaattcccagttattatttatgtttttattggctgggcacagtggctcacacctgtaattccagcactttgggaggctgaggcaggcagatcacttgaggccagaagttcaagaccagcctggccaatatgaggaaaccccgtctctactaaaaaatacaaacatttagtcagacgtggtggcccttgccttagtcggtgtgagaactgactaatgcaattagtgagactatattatgaacctttatagtgttagaaataaattttcggtgccacaaaagaaacagcactcgaacattaattttctcagcacggcaattttacttctatagaagggtgcgtctggcaggtggagcccagcgccgcgctgcggggcctgctgggacttgtagttcacaggctcagggtgcgcaggcgcaatgccgagtttgcctctgcgcgagtcggggttggcggcgcctgaacgagcacacctgaacgagggaggagaaggggttcttacccctgacgcaggtacccctactgctgtgttgttcccctattggctagggttggcccgcacagtctaagctgattctgattggctgttttaaagagcaggggtatgagccagagtggcggggtgagtagtttggcaggaaggacggctacagaaaaggtgactcagaatgactaagaacagagcaggtgaccaaggataactaaggtcagagcaggtgacaagggtgactaagaacagagcaggtgaccaaggataactaaggtcagagcaggtgacaagggtgactaagaacagagcaggtgaccaaggataactaaggtcagagcaggtgaccaaggataactaaggtcagagcaggtgaccaaggatgactaaggtcagagcaggtgacaagggtgactaagaacagagcaggtgaccaaggataactaaggtcagagcaggtgaccaaggataactaaggtcagagcaggtgaccaaggatgactaaggtcagagcaggtgacaagggtgactaaggtcagagcaggtgaccaaggatgactaaggtcagagcaggtgacaagggtgactaagaacagagcaggtgaccaaggataactaaggtcagagcaggtgacaagggtgactaaggtcagagcaggtgaccaaggataactaaggtcagagcaggtgaccaaggatgactaaggtcagagcaggtgacaagggtgactaagaacagagcaggtgaccaaggataactaaggtcagagcaggtgacaagggtgactaagaacagagcaggtgaccaaggatgactaaggtcagagcaggtgaccaaggataactaaggtcagagcaggtgacaagggtgactaagaacagagcaggtgaccaaggataactaaggtcagagcaggtgacaagggtgactaagaacagagcaggtgaccaaggataactaaggtcagagcaggtgacaaggatgactaaggtcagagcaggtgaccaaggatgactaaggtcagagcaggtgaccaaggatgactaaggtcagagcaggtgacaaggatgactaaggtcagagcaggtgaccaaggatgactaaggtcagagcaggtgaccaagggtgactaaggtcagagcaggtgataggggctaggaggggttgtttactgaaactaggggcaaggaaacgaaaagaacgaggaagttaaagtttaaaatgaagaacaaagaataggtggccgggcgcggtggctcacgcctgtaatcccagcactttgggaggctgaggcaggcggatcacgaggtcaggagatcgagaccatcctggctaacacggtgaaactccgtctctactaaaaatacaaaaaaattagccgggcgtggtggcgggcgcctgtggtcccagctgcttgggaggctgaggcaggagaatggcgtgaacctgggaggcggagcttgcagtgagccgagatcgcgccgctgcactccagcctgggcgacagagcgagactccatctcaaaaaaaaaaaaaaaaagaacaggggagctgaatatacggaaacattggttctttggagaggagctcataactgattgtacttaacaatttacaggctaaaacctttgaagaggaatttgttgtatcctacaacagtatattaattatagtagttttactattttaatttctcataaataacaatcagtagaatattaaataaatatttaaacaataatttaatttggctgggcgtggtggctcacgcctgtaatcccagcactttgggaggccaaggcgggcagatcactggaagtcaggagttcgagaccagcctggccaacatggtgaaaccgcgtcgctaccaaaaatataaaaaattagccgagtgtggttgtgcacgcccgtaatcccagctacttgggagactgaggcaggataatcgcttgaacccgagggggcggaggtttcagtgacctgagatcatgccattgcactccagcctgggcgacaagagcgaaactcagtctcaaaaacaaacaacaattacttaagcaatcattttaataagtatgtaatacattatacgtttatataacttgcttaataaataatagtagttattaatatccaatggcaagccgccgggaaacgacggagctgggatttgaggattggctccgcgaaccccacaacacccggggactccagcgaaccacacggggtggatccaacagccgcaggggcatcgtggtcctgcggagacgccgcccgcccggaggcggcgctgtgacccaggttggagagtcaggagcccagcgccgcgctgcggggcctgctgggacttgtagttcgcaggttcggggtgcgcaggcgcagtgccgagtttacctctgcgcgcgtcggggttggtggcggcggctgcggcgagttcctgaggggcgcctgcggggggcgtccgctccgagcgccgaggagccgagcggaggaggcgtcccagggacacgcaggggaggccggccggcctgcacggggcgctcccgcctcgggggccctgtctggcgcctcagcgcgcgccccgatggtcacctgcgcccacctgggccggcgcgcgcggctcccggcagctcagccgtaagtgccgccgcctcccgcgccgcgacctccgtgccgggcctgccggggctctggtggggctgggtctggcggggccgggtggccggggcatgaccctgtcgcgatagggtccccacgggagggtcgggagccggcagctcgcccagggccccaacgcccaggatggcacggtctgcccttgccctgtgaaaacgcccctgggtgagagacgcataagctttccgaggcccagcctgcaaggagagggagaagacgcattgactctaccctaaaggcagagaggggctgccacgctcgcactgcagtgaggccacatcagagggtctgagcgaggggcggtcctgccctccaggggacaccgggcgatgtctggggacgtctgtggttgtcataactgggggcagttcctggcatggagtaggtggaggccagggatgcaactcagcaccctgcccagcccagagaatgacccaggctccagtgtccacagcgccctgagggagagacctcacttatacgttagcaccgctgtcctggtgataagacagcaagggtccttttttttttttttttgagacggagtctggagtgcaatggcatgatctcggctcactgcaacctccgcctcccgggttcaagccattgtcctgcctcagcctcccaagtagctgggattacaggcgtatgccaccacgcccggctaatttttgcatttttagtagagacggggtttcaccatgttggccaggctggtctcgaactcccacctcaggtgatccacccgcctcagcctcccaaagtgctgggattacaggcgtgagccaccgcgcagctgcaagggtctattctgtttatacccaccacccatgttgaggaatgagggaggcagctgacctttctgctgctctagcaaccccaacctccctgaactctcccctacccaaacaggttggtttctttttcttcttcttttttttttcttgagacagtctcgccctattgcccaggctggagtgcagttgcacgatctcggctcactgcatccacctcgtgggttcaagtgattctcctgcctcagcctcccaagtagctgggattacaggtgcacgccaccccgcctggctaatttttatatttttagtagatacagagtttctccatgttggccagccaggctggtatcgaactcctgacctcaggtgatccacctacctcggcctcccaaagtgaccactgcgcccggcgcctttggttcttacatgagcctcctggagctgctgtgacaatgcaccacaaaccagggggcagggggaggcttgaaatttattctctcacaagtctggaggccagaagcccaacatgaagatgtggtggggccgtggtgcttctgaaggctctggcgggaggatcttctctgtctcttccagcttctgggggtggcctgccatagttggtgtcccttggcttggggccacatcactccaagctctgcctgcatcatcatgtggccttcttccctgtgtctctttctccttttttgtttttatttttattttttgagatggggtctcggtctgtcacctggctggagtgcagtggcacgatctcggctcactgcaatctctaccccacaggatcaagcaattctgcctcagcctctcgagtagctgggattacaggtgcacgccaccacacccagctaatttttgtatttttagtagagacgggggttttgccatgttggccaggctggtctcgaactcctgacctcgtggtctgcccgccttggcctttcaaaatgctgggattacagacgtgagtcacctagtccagctgtctctttctcttataaggacaatactcatgaccccagtagctggaagaggcggaaggatttttcctgagagcttttgtttcttcttttccttatcttttctttttgagatagagtcttgctccattgcccaggctggagtgcagtggcacagtcttggctcactgtaacccctgtctcccaggttcaaataattatcgtgcctcagcctcctgagtagctgggtttacagggatgtgccaccacacctggctattttttttgtatttttagtagacgaggtttcaccatgttggccaggctggtcttgaacccctgggctcaagtgatcctcgcgcctcagcctcccaaagtgctgggattacaagtatgagccaccatacccgagcttttccctagagccttcagagggagtacagccctgcccacaccttgatctcagacttccagaactgggaaaggatatattcctgttattttaagcccccgggttactggcaccttgtgaaaacagcctcaggaaatgcatggagcgcttcacttcctaatggagcctgggtgttttgtaaacttgtttgcttccaagggcctcaggaccttcatccataaaatggggcctttaagacccctggccatggatgtgtgtggcgtctcacacctttaatcccagaatttagggaggctgaggaaggtggatcccttgagcccaggagctatagacctgggacaacatagcaaggccccgtctctacagaaaatacaaaaaattagccggacatggtggtgcctgtagttccagccacaggctgaggtaggaggatagcttgagcccaggaggttgaagctgccatgagatgagctatgattgcaccactgcactgcagcctgggcaacggagggagaccctatctcttaaaaaacacaaaccctggcttcagtcctgggttctggcttcagtttacctccctctgtgtatggggggccccttcaagcaaatggaggttctccaggccaagggctctgggatctggggactggcctggatctggtattcgcagcgcctttttcctccccacagctctgcctgcccaggaacctgcttttcccaagaggagagaatggctgctgggtacctgccccgctggtcccaggtgagatgtcctcattctcccaaagggcacccagtatatccagagggaacaatcccaccagaaactcagtcctcgatagaggagaccccttgctatgtgaaagttcaggagaattccccaggagtggtgtgtgggatgaggtactcctgctgctcccaggtgtaaagagtgaccctcagtattgggactgagcacagcctctccctaggagacagtattacgggatccctggggtgtcagtttttctggctggaaacctctgtggctgtggtacctttgcccaagttcttgtcctgcatccaagaagaatgaggtatacagacaagtgaagggtgaagaagagttgtatttactgttagagcagctcagaggattgagcagctcctccctgttggcaggttgtctggtcgagtgttcagctctcagcagagaggaggcctaggagagggtggctcctctccacaggcaagtcattcggacgtctctgcaggtctctgaagctctcagcagggacggtagctcctctctgaagctctcagcagggatggtagctcttctctgccggcagatcatctctgcagccttcagtggagagggtactcctctctgcagctggtcgtccggtcccatcctgtcatctgtctgccttctttgtcctctggccgtcctctgccctgctaagcctgagcccagggcttttacggacctcagaggggaggaagtgtgtgccgactggttcatgggcggccatgggagggtcgaaagaggcaccatgagtccccactctggtctgtaggactggcagcctggcccccagtcttcaggccctccctggcctgaaggtggggccttactggggacccacccccttctgcccaggaattaatctgcctcctgctgccattcacggccctaggacttggcccaaaccccactctgagagaggccaggcagtgggagcagacacccctgaacctgcagggactagggagtccttcctgagactcctgagggtgcaggttgcagagatgcctgggtcctgcgcctgggaggacagccacggctgcacccaggagctcctgcctcgcccacttggaggaggcagggctctcacttgtctccagctcctgcctgcttcctggagtgcgaggcccaggtctgcagctgcgggtctggcagcttcagctgcacccaggagggcagatcctgcctcttctcagttcccccaagagcacagggaggctcgaatccacagctacaggaggacggggctcccactagctccatggagtgtgcagccccggtggcacctccctgctgctgctgacatgatggcatcagccactgccatcaacaggtgggatccagcaccttcccctggagagcaggcagtgctgcccaggaaggcatcctcctctttacctgaaagaatatttctgtaactgtgataaaacacacatgaaatacatatgaactttaccatcttagccgttgataaaacacacatgaaatacatatgaactttaccgtcttagctgttgataaaacacacatgaaatacatatgaactttaccatcttagccgttgatgaaacacatgaaatacatatgaactttaccgtcttagccgttttcaagtgcacagctcaatggcattaagttggacaaccatcaccaccctcctctctagaacttcctcctcttcccaaactgaagctctgtccccatgagacactcattccctgtccccctccccagcccctggtaccccccatcctactttctgtctctctgaatctgacaactctagggacctcctaggagtggaaccacacaggctttgtccttctgtgtctggcttctctcactgagcataacgtgattgcagttgtttttttttttttttttttttttttttgagacaaggtcttgctctgttgcacaggttggagtgcagtggcgcgatcttggctcactgcaacctctgccgcccaagctcaagctattcttgtgtctcagcctcccaagtagttgggattatgggcatgtgccaccatacccagccaatttttgtattattagtagagacggggtttcaccatgttggcccaggctggctgtgaactcctgggttcaggtgatccacccaccttggcctcccaaagtgctgggattacaggtgtgagccaccacgtccgccctctgcagttttatttaagacagagtttcgctctgttgcccaagctgaagtgcagtggcacaatctcagctcacgctgagatcccacctcccgggttcaagcgattctcctgcctcagcctcccaagtagctgagattacggcactcgccaccatgcctggctaatttttgtatttttagtagagacagggtttcaccatgttggccaggctggacttgaactcctggcctcaaaggccaaagtgctgggattataggcacatcctggagtgggatttttaaaatattttaaaaattttttgtagaaactgggtgtcactgtgttgctcagtctggtcttgaactcctgggctcaaacagagtcttcccagcttggcttcccaaagggctgggattaccagtgtgagcaaagtcggaagagtttgttttttttttccaggatgcaactgaagagggagaggtgaaggcataagacaggggtggactgaagcgagtccatacagggcccttaaggctgggattgaaagctcagggtgcctcctgtatgcctatggttcaggtgctagaagtggttctacatcttttctttctttctttctttttttgagatggagtttcactcttgttgcccaggctggagtgcagtggcgtgatcttggttcactgcaacctctgcctcccaggttcaagcaatgctcctgcctcagcctcccgagtagctgcaattacaggcacccgtcaccacgcttgactaattttgtatttttggtagagacggggtttctccatattggtcaggctggtctcgaactcccaacctcaggtgatccgcctgcctcggcctcccaaagtgctgggattacaggtgtgagccaccgtgcccagccagtaactttttttttttttttttgaaatggagtcttgctttgtcacccaggctggattgccgtggcacaatctccgctcactgcaacctctgcctcccggttcaagcgattctcctgcctcagcctcctgagtagctgggactacaggtacgtgccaccacgattggctgatttttgtatttgtagtagagatggggtttcactatgttggccaggctggtcttgaactcctgaccttgtgattcacctgcctcagcctcccaaagtgctaggattacaggcatgcgtcacagtgcccagccaacttttacatcttacagcagataccagcttacgtgctgttttataccatggattacctggatagccattcaggccctaaacactcatcagccccttcatatgttgaaacaacaaagcttttgccatatttcagtgggtcaaggttgttgtagcagattcctctttttttttttttttgagatggagtctcgctctgtcgcccaggctggagtgcagtggcgtgatctcggctcactgcaaactccacctcctgggttcatgccattctcatgcctcagcctcccgagtagctaggactacaggcgcccgccatcatgcccggctaatttttttgtatttttagtagagacggggtttcactgcgttcgccaggatggtctcgatctcctgacgtcgtgatccacccgcctcggcctctcaaagtgctgggattacaggtgtgagccactgcgactggctgcagattcctcttcttacattgtccatgccttgtaatgtgtaactctgagtcatggaagcaaagagaactaatctctaataactgtgagttttgaggaaggtcctgttccatcctgctttttgttgggtattgcttctcagtcttctgactatggcaatagcaaatgctgtgactgatattaactagttagtcctcacgacaacacactttggataaaattcttctttccattgaacagatgaggaggctgtgtcctggataggtcagcaatatacctgcagtcccataacttgcaagtggcatatccatgacatccattcattttcagaatcagcagggggagattctcacatgggaatgtcaggctcagagatccagaggttagaatcaccagttcaataagaaatgggcaaaatgtttcatccagacctgtgtgctggtcgtccttgttgtgttgatggtgggcctagggtctgtatgtccctctgattttaagccaaggacaagcacccacaaggcagctagtagaaactgacttatggactttgcaccttgacctttctcaacttccctggtgccaccaacctcacccctcctcccatgaacgtgggtggcgatggacccatcttgagcagaactgctgtgatattctaggaattagtaacctttgaggacgtgtccatggacttctcccaggaggagtgggagttgctggagcctgctcagaagaacctgtacagagaggtgatgctggagaactacaggaacgtggtctccctgggtaaggcaagcatcactaattcctgtgttcattgattcacatttatctggtgtattagtctgttctcacactgctaataaagaaatacccaagactgggtaatttgtaaaggaaagggggtttaatggactcagttccacatggccggggagggctcacaatcatggtggaaggcgaatgaggaacaaagtcacatcttacgtggcggtaggcaagagagcttgtgcaggggaactcccatttgtaaaaccgtcagatctcgtgagacttattcattaccacgagaacagtatggggaaaaccacctccgccatgattcagttatctccccctggctccacccttgacgtcgggattattacaattcaaggtgagatttggatggcaacacagccaaaccatgtcatctagcatctactatgtgtctggcaccatgctgggaatgggggattcattggtaagtaagacagacatgggtcctggttttgtggctttcgtggtctggtttctctgagaacagatgaccttacttgttcagtacgtgatagctggagctgcagtgcaattgcatgtctcagctcaggcatagataacttctctgattccccttgggaacaaagtcagagtgtcttagtccgtttcacactgctataaagagtaccacctaggctgggtgtggtggctcatgcctgttatccaagcacttagggatcacaagggtgatcacctgaggtcaggagttcaagaccagcctggccactgtggtgaaaccctgtctctactaaaaatggcgggcacctgtaatcccagctactcaggaggctgaggcaggagacttgcttgaacacgggaggcagaggttgcagggttgcagtgagccaagattgcaccactgcactccagcctgggtgacagagcaagactccgtctcaagaaaaaaaaaaaaaaagcaagaaaagaggtttaatggagtcacagttccacatggctcgggaggcctcaggacacttacaatcacggcagaaggggaagcaggcaccttcttcaaaaggcagcaagagagggaagagagcaggggaaaccttataaaaccatcagatctcatgagaactcactatcacgagaacagcatgggggaactgcccccatgatctcatcacctcccatcaggtacctcccttgacacgtggggattacgattggagattacaattcgaggtgagatttgggtcgggagacagctcaaccatatcacagagcatttgtactctttctgccaaggtaaagagccatcattaaaaaaaaaaatgtttttactgtgataaaaaatgtaggctgggcgtggtggttcatgtctgtaatcccagcacttcaggaggccaaggtgggtggatcacttgaggccaggagtttgagaccagcctgaccaatgtggcaaaaccccatctctactaaaaatacaaaaattagctgggcatggtgatagacgtctgtaatcccagctacttgggaggtcgaggcatgagaatcgcttgaacctgagaggcagaggttgcagtgagccaagatcgtaccactggactccagcctgggcgacagagcgagactctgtctcaaaaaatatatatacagcagtggctcacgcctgtaatcccagcactctgggaggccaaggcggggtagatcacctgagagaccagcttgaccaacatggagaaaccttgtctctactaaaaatacaaaattagccaggcgtggtggcgcatgcctgtaatcccagctactcaggaggctgaggcaggagaatcgcttgaacccaggaggtggaggttgcggtaagctgagatcgtgccactggactccagcctgggcaacaagagcaaaactccctgtcaaaaaaataaaaaaagtatatatacatatatatatgcacacacgtatctatctatatatctctatataaacataaaatgtgcctttttcaccccttttaagtgtgcagttcagtggcactaaatgcattcagcatgtactacagccaccacaactgtccatttccagaacttttatcctcaaccaaaactctgtacccgttaaattctccctccccagcccctccttcagccccttgtaaccatgagtcactctccatctctatggatttgcctaccctggacatttcttttcttttctttttttgagacggagtctcgctctgtcgcccaggctggagtgcagtggcgtgatcttggctcactgcaagctccgcctcctgggttcacgccattctcctgcctcagcctccggagtagctgggactacaggcgcccgccaccatgcccggctaattttttaataattttttgtatttttagtagagatgggatttcactgtgttagccaggatggtctcaatctcctgaccttgtgatctgcccacctcggcctcccagagtgctgggattacaggcaggagtcaccgtgcccggcagacatttcatataaatggaatcatataatatgtggccttttgtgtctggctgatttcactgggtgtgatgttttcagtgttcatttacattgtagcctgtgtcagtgctttgttcatagatgaagaagattccatcgtgtgtatacaacacgctgtgtccatccattcaccagttgatggacgcctgggtttccacctttccgctgttgtgaatcctgttgctgtcagcattggcaaacaagtatctgtttcagtcactgttttcagtgctttgggtcaatactaggagtagaattgctggatcatgcggtaattctatgtttagaatttagctttttcaggaactgccatactggcttttcttttgtttttttgttttgagacagagtctcactttgttgcccaggctggagtgcagtggcactctctcaggtcactgcaacctctgcctccgcagttcaagtgattctcatgcctcagcctcccaagtagctggaattacaagtgtgcaccaccacacctgtttttgtatttttttttttttatgagacggagtttcgctctcgttgcccaggctgaagtgcagtggtacaatctaggctcaccacaacctccacctcccaggttcaagcgattctcctgcctcagcctccccagtagctgggattacaggcatgcgccaccacacccggctactgtttttgtatttttaatagagatggatttttgccatgttggccagggtggtgttgaactcatgacctctagtgatccacctacttccgcttcccaaagtgctgggattacagacgtgagccactgtgcccagccccatactgggttttgtatcagcatgtatattttccattcccaccagcagtgcagactgttgcaatttctccacatccttggcaacacttactattttttattatggcctttctaatatgtgtgaagtggtatctcattgcggttttgatatgcattcccctaatgaccaatgacatcgagcatccattcctgtgtttattgaccatttgtgtatcgatttttgggggaaatgtaagatctgtaattttttttttttttttactctgtcgcccatgctggaatgcagtgctgcaatctcggctcactgcaagccctgcctcccgagttcatgtcattctcccgcctcagcctcccaagtagctgggactacaggcgcctgccaccacacccggctaattttttgtatttttagtagagacggggtttcaccgtgttagccaggatggtcttgatctcctgacctcatgatccacccgccctgccctcccaaagtgatgggattacaggtgtgagccactgcacccgccctttttttttttttttttttttgagacagagtctcactctcattgcccagcctggggtgcagtggtgtgatcacagctcactgcagccttgacctccccagggctcaagtgatcttcccacctcaatctcccaggtagctgggactataggcttagaccaccacacctggctagtttttttgtttgtttgtttttggtttttttttggtaggtccggggtcttgtcatgttgctcaggctggtctcaaactcctgtgttccagtgatcacctgcctctgggcctcccaaagtgttgggattacaggtgtgagccaccacgcccaaccagatctgtaattttttttttctttgagactgagtcttgctctgttgcccaggctggagtgcaatgccacgacctcggctcactgcaacctctgcctcctgggttcaagtgattctcccacctcagcctcctgagtaactggggttacaggcatgcaccaccacgcccagctaatttttgtatttttagtagagatggggttttaccatgttggccaggctggtctcaaactcctgacctcaggtgatccgcctgcctcggcctcccaaattgctgggattacaggagtgagccaccatgcctggcacagatctgtaattttttaactagaaaataaaatcattatcttgtgctacctctcaagtatactcttgtctttttcagaagccttgaagaaccaatgtactgatgtggggattaaagagggtccactttccccagcacaaacctcacaagtcactagtctttcctcatggacggggtatttactttttcaaccagtggcttcttcccacttggagcaaagagaagccctgtggatagaggaaaaaggaactcctcaagcctcctgttcaggtgagaatcaggcagatagaaaccattgggatggcagtggcatcgtgggaaacattggtcagagagctcttcacaaggccctgattctgtaaggagaatgccaagatccctttctcggacaccttcagttcattttctggcagctttctccttctctttactaccttacatgacctctctctggatacagagaaaagagtatctcattttcttgttttatttatttatcttaagacagggtctcactctgtggcccaggctggagtgcagtggcatggtcatatctcactgcatcctcaccttcctgggctcaagtgatcctcctgcctcagtctcctgagcagctgggactataggcacatgccatcactcccacctattttgtttttctcagagatggagtctcactgtgtttcccaagctggtcttgaattcttggactcaagtgatcctcctttctcagcctcccaaagtgttgggagtacaggcatcagccatgactcctggccccattttcttctattttttccccccattttcttcttgaagccattttgcctatgtttctagttgtctcttccctctttgctttcttgataattctttctctctgccagacatattctcccagcttaacagggtaatttctttctttttttttgaaacagtctcgctcttgttgcccaggctacagtgcagtggtgtgatctcggctcactgcaacctccacctcccaggttcaagcgattcttctgcctcagcctcttgagtacaggtgtgtgtgccaccacgcctagctaatttttgtatttttaatagagacagggtttcaccatgttgatcaggctcaaactcctgacctcaggtgatccacctgcctcggcctcccaaggtgctgggattacaggcgtgagccactgcacctggcctacagagtaatttctttctgcattgatatttccctgccttttcccatcactgtcaatcttccactgctgcatctcatcctcagtggccttccttgccacccatctctctttttcccatccttcccgcatgttcagagttgatatttgaacatcagtccgcacaggccttgtagatgtcagaaggacttctgtcccgctggttttcaagtagctgtttcttcttctaaaaaaatggtttccgcctcaatttatttcagattggatgactgtactaagaaaccaagactcaacttacaagaaggtggctttgcaggaggaaccagccagtggtataaatatgataaagcttatcagagaagatgggggatggaagcagttagaggacagccatgaagacccccaggggcttttgagccaaaaggcatcccttcacgtagtggccgttcctcaggagaaggctactgcatggcatggatttggggaaaatggtaatctgagcccagcccttgttttatcacagggaagctctaaagggaaccacttgtgtggcagcgagttagatattacaagcttggcatccgattcagtcttaaaccaccatcagctgggatatgcagatcggagaccttgtgaaagtaatgaatgtggaaatgccatccgccagaacagtcactttattcaacacggggggaagatgtttgtgtatttggaaaatgggcagtcattgaaccacggtatggccctgactatccacaacaaaatcaacacggcagagaaaccctttgagtgccaccagtgtgggaaggtgttcaaccggaggcattctttgagcgaacatcaaagaattcacacgggggagaaaccctacgagtgtcaggagtgtgggcgagcctttacgcacagctccaccctcacgcgccatctgagaactcatactggagagaagccctacgggtgcggtgagtgcgggaaagccttcaacaggatctcatcgctgactcagcatcagaggattcacaccggggaaaagccctataaatgtgaagactgtgggaaatccttctgccagagctcttacctgatcttgcacaagaggacacacaccggagagaagccctacgaatgcagtgaatgtggaaaggccttcagtgaccgttcctctctcaaccagcacgagcgaactcacacgggcgagaacccctatgaatgtaagcagtgtgggagagccttcagccagaggtcttcccttgtgaggcacgagagaactcacactggagagaaaccctacaggtgtcaggaatgtgggaaagccttcagccagagctcatcccttgtcacacatcagaaaactcacagcagccagaaaacctataaaatcattgactgtgggaaagcgttctaccagaacagacatcttattggatattagcaattgcacgctgctttgtaagccactttttagtactctgacacatacatgtggttatcttttgccctgttgtgatggataatttgaaaagaagtgggtttatgtcaccttctcaccttcttataagaaagctctgagaatgggcatttttgtattttgttgttgttgttgagatggagtctgccacccaggctggagtccagtggcgtgatcatacctcactgcagcttcaacttcctgggctcaagtaatcctcccaccccagcctcccaggtagctagtactataggtgtgcaccaccacgcccagcaaatttttaaatttattatagagtgggaggcagggtgcggtggctcatgcctataatcctaacactttaggaggccgaggcgggtggatcatgaggtcaggagatcgagaccatcctggctaacacagtgaaaccctgtctctactaaaaatacaaaaaagtagccgggcgtggtggtgggcgcctgtagtcccaactactcaggaggctgaggcaggagaatggtgtgaacccgggaggtggagcttgcagtgagccgagatcgcaccactgcactccagcctgggagacagagcgagactccgtctcaaaaaaaaaaaaaaaattatagagttggggtcttgctacattgccaagactggtcttgaactcctggggtcaagcatcctcctgtcttggcctcccaaagtgttgggattagaagcatgagccgctgtgcccagcctgacggggccttttagtgggaggagttgccattacactacgtccagtaagctccagactttcggaaaagattggtggacgggaatgctgtcatggatgggatcttgccaagaaccatcacgtgttaatttagttgcttaaacaaaaggtgttctgtttcttaactacttctgtgtctttactttttatttcattgttcattgtttttattttaatattcttttctgggtttatatgagacgagttttcactctgttgctgaggctgaagtgcagtggcgtgatcatagctccctgtagtcagccttcatctcctggactcaagcaatcctcccacctcagcctctccggtagctgggactacacatgtgcaccgctaccacacccagctaaattttttttttgtatttttgtagtgatgggctttcaccaggttgcccaggctggtctcaaactcctgagctcaagcaatccacccaccttggcctcccaaagtgctggtattacaggtgtgagccaccgtgctggtattacgggtgtgagccactgtgctgggattacgggcgtgagctgcccatgctgggattacgggtgtgagccaccgtgctggtattacgggtgtgagccaccgtgctgggattacgggcgtgagccactgtgctgggattacgggcgcgagccactgtgctgggattacaggtgtgagccaccctgctgggattatgggtgcgagccgccgtgctgggattacaggtgtgaaccactgctcctggcctttatttcagcattctgtttcagtgtttcacattggccacttagctagatccgtttgtcttctgcagtactgtgctgatccagagtatatgctaagacggaaagcgctttggaggtaaagtttaaaaaatacaagggcttcaaaatagtactagtaatttgatccattcacaaaaggacaaaggctggacagagacgtgaagaaatgaatcatttacgcaatgattggggtgttccaattatgtgtgattttgtgttttctgccgtttcattttgtattgccataatcattttgacaatgaatacaaatcaaatagcacccaaaattgtgaaggatacggaacctcattgatgagtcaggatagactgtgggtacctagatggtagagacatagtatagtagactttgggacatagagggtggaatgacctttggtggcctgggaaaagtcccgcctgtgagatgtccctagcaaaatcaagaccaggagtgctgatgtgcattatcgtcatgaacatgtattggatgcttactgtataccaagcaccagccaagtacttccatgtggttcttcatttagccctcacgaccccatgagataatcactattcacattccattttacagaagacaaaacggaaataatttgctcaaggtcacacaattagaaaggagtagaatctgggctgggcacagtggctcacacctgtgatcccagcactttgagaggctgaggtgggtggatcacttgaggtcaggagttcgagaccagcctggccaacatggtgaagccccatgtctaccaaaaaatacaaaaattagggaggccgagatgggcggatcacctgaggtcaggagttcgagaccagcctgaccaacatggagaaaccgcatctctactaaacatacaaaattagccggcatggtggtgcatgcccgtaatcccagctactcggaggctgaggcaggagaatcgcttgaacccgggaggtggaggttgctgtgagctgggacagtaccattacactccagctctgggcaacaagagtgaaactctgtctcaaaaaaaaaaaaaaaaaaaaatctgggcgtcgtggtgcacgcctctaggcccagctattcaggaggctgtggcatgagaatagctgatgtttcagtgagccgagatggtgccattgcactctagcctgggtgacagtgagactctgtctcaaaaaaaaaaaaaaaaagtagtggactctggatttgaccttgagcaccctgtacaaagccacacctcatttgccaggccaccaagcaggggaactgttttccaaatgttctcttggaaagctgggtgtagtggctcacaactgcaatcccagtattttgggagcctgaggtgggaggatcacttgagcccaggtgttcaaaaccagcctgggcaacattgaccctgtctctgcaaaaaatacaaacattagccaggcatggtggctcacgcctgtagtcccagctactctgggggctgaggtggaaggaccgcttgagcccaggaggctgaggctgcagtgagctatgagcataccaccgcactgcagcctgagtgacaaagcaagaccctgtctcaaaaaaattttacaaattttctcttaggactcatctaactttcctgtgaatgttccctttttccttgagctaatgagggaggttgcccgtcagatctcctttcacccaaatggaacatgttgcttttccttagagatccttgatccatggtcagtctagaccctattgggttgatgagtaagtttctttaggggctctgtgaacaactttgagaacaactttgtgtgctggtgcattgatgtgttttttggggaaagcatctgtaacttccagcatattcttgagaagggttgacttagaagtctcctgactgtactgttttcagtcttgttatctccctccagcaattatattttattttttgagatggagtctcactgtgttgcccaggcaggagtgcaatggtgagatttcggctcactgcaacctctgcctctgggttcaagcgattctcctgcctcagctcccaagcagctgggactacaggcatgcgccaccacgcccggctaattttttttgtatttttattagagatggggctttcaccatgttggccaggctggtctcaaactcctcacctcaggttgtccacccacctcagcctcccaaagtgctgggattagaggcgtgagccaccgagcccgggcacactatttttaactggaagctgctttcctatgtcagtcctctaaacattaatttttataaaagtgtgtaaaaccttcctaggaaagataaaaataaattttaaaaattgtttctaaatgaaatgtcaatatcagaatttgaacaaccacttaagctatggagttttctgaaatgaataaccattaactgtgtttggttttcagcccctgtctattaagtgtattcagtgttttcaggcctatcacaatcgtttttcctttttttaaaaaaaattgaaggctgggtgtggtggctcacacctgtaatccaagcactttgcaagtccgaggcaggtggatcacctgaggtcaagagtttgagaccagcctggccaacatggtgaaacctcatctctactaaaaaaataaaaattagtaggccaggcgtggtggctcacacctgtaatcccagcactttgggaggccgaggcgggtggatcacataaggttgggagttcgagaccagcccgaccaccacggagaaaccccgtctctactaaaaatacaaaattagccaggcatgatggcaggtgcctgtagtcccagctactcgggaagctgaaccaggagaatcgcttgaacctgggaggcagaggttgcagtgagccgagatctcgccattgcactccagcctgggcaacaagagcgaaactgcgtctcaaaaaaacaaaaaacaaaaaaattagctgggtgtggcggggcaggtctgtagtctcacctactcggaaggctgaggtacgataatcacttgaacccgggaggtggagtttacagtgagtcgggatcctgccattgcactccagcctgggtgacagagcaagactgaaaaaaccaaaaatttaaaaaaaaaacacttccctcctaaggttcaatccaattcatttaaacttttgcgtgtttttcttatatcagttaaaatagggattcaatatccttagaaatatagccttttctgttttaaatataacatctaaaaattgtagtaaaatacaaataacaaatatttaccatgttcatcatttttaagtctaaagttcagtggcgttagatacgttcctgttgtgcaatattatagacttccttttttttttttttttttttttgagacggagtcttgctgtgtcccccaggctggagtgcagtggaatgatcttgactcactgcaacctctgcctccctgggttcaagcgattctttttgtttttgttgttgttgtttgtttgtttgtttgtttttgagacggagtctcgctttgtcacccaggctggagtggtggagtgcagtggcgcgatctcggctcactgcaacctctgcctcccgggttcacgccattctcccgcctcagcctcccgagtagctgggactacaggcacccgccaccaggcctggctaatttttttgtattttttagtagagacggggtttcaccgtgttagccaggatggtctcgatctcctgacctcgtgatccgcccgcctcggcctcccaaagtgctgggattacaggcgtgagccaccgtgcccggcctcaagcgattctcttgcctcagcctccctagctgggattacaggtgcgcgccaccacgcccggctaattttgtatttttagtagagacagggttttgccatgttgggcaggctggtcttgaactcctgacctcaggtgatccgcccgcctcggcctcccaaagtgctgggattacaggcgtgagccacagcgcccggccagcttttcaatcttccaaattttggggggatgtacttaaaaaaatgatctgaaaacattttccttagagtttaaaatatgaacttgagagtttttttgttttttaatatggagtctcactctgtcgcccaggctagactgcagtggggcgatctcgggtcactacaacctccacctctcgggttcaagcaattctcctgccccagcatccccagtagctgagattacaggcgcccggcaccacgccgggctgatttctgtatttttagtagagaaagggtttcaccatattggccacgatggtctcaaactcctgaactcagatgatccgtccacctcggtctcccaaagtgctgggattacaggcgtgagccactgcgcccagccaaatgtgagggttttaatgaacatctcatatcttctggttgatttgagcaaagctcctgccccctgccaggctttgggttcggcctcccccagaccgggtctccggattcgcagccccctgggcggggtctccatgtcgcccgcagcgcgatgacgtcacgtctgcgggtcccgcccccacgtaggtctcggcccttcggacccggcgcccagcccccgttcgccctgccaggcccgggccgcccgcttgcatccacctcctgtccggacaaggggtcgcctcgtgaggaaactagtctggagttcccacgcccgtcccggaggaggacgcgggcggggcgcccgaactgcggggagagggcgattccgccccgggctgaaaccagttcgcccagaagccagtgtccccgcagggcgggacagccacgcgtgttcgcaacgctcccgtcactcaccggcagggggtgggccctagggaactacccagtcaggacgggcgggggcggggccgagacaagtatccaatgagggacgcccaatcggaatccggggaactgcccaatttacagcgccaggggacggactggggaattctccaatcagagtcgccgacgttggcagcactgtccaatcagaagcgcggcttcccgagctctgtctaatcaggcccctgggacgggacgcctctgtcctagccgtgagtgccccgcctgcccctagcggtccctggcgtcccggttcctgtcgcgctcacctgcgccggtagcgaagaaatcgccccgggacatggtgagtgtggcgcaggagaggatcccggtgcggggcagcaggaaccggcgaccgcccgagaccgcggcttggggggagctgagggacgcggggggcggccccggcgagggcggcgcaggacgggagcctgggccccgggggtcccgcccggccccgcctcccgcgctgaggtcgcggctagggcgctccgagctccgggtccccgcccgcctctggccccaaggctgcagagcggggagcggcgcccggagcccgactccgtccccgtcgtcccggggtccccgcgtccctgcgctcccgaccccccacgccccgcccggggccgcgacgcctcggagcgtttcgctgcggcttcgggacccccgggccgcgggaggcagagtcgcccgagaccccgaggtgcggtccaggctcccccgggacccgccctggggccgacgccgcggtgcctcctggggtgcgggtccctggtcggtgccgcctccgctcgcgctcccgcggctcagctccttggaggccccgcgcctccggccgcggtctctgggggaccctgggttcctcccgggacagcccgggagcggtggggcctcggcgggggcggagacgcccccacctgcaaaggcagcccctggggcgtgcgaggtttcctcccctgagtcccggttttccttcttgaggacttcttgtcccctctgaccccaagatgcctggggtaggtaaggggaaaaaaaacaagggttcctggtccctgggctctcacacacaaggaagaaaagtaactgaaaagactagagaaacaagggagagcgaggaccccaaaagcaaacgcacgcagacccacagcggggacgcccgggaggctggtgcattagtgtcctcggactgctgtagcaactgactgcaaacgagggggctaaaaccacggaaatatattctttcacggttccctagaaagtgtggatttgaagacgtttctcagttctgttttgagtactagcaatgggattccttgctgaggcaacacctgagttgggggtgggagggcgtccgtcgtggtagcctggccagacttgacccctccctgggtttgtcactgtgaaaagattttccttttttcgagtcagcagtttttaggaagtgaaacgtacatttaattagtagaagttggaagataaaatatttccaggccgggcgcggtggctcaagcctgtcatcccagcactgtgacaggccgaggggagcagattacttgaggtcaggagttggggaccagcctggccaacatggagaaaccccgtctctgctagaaatacaaaaattagctgggcgtggtggcgggtgcctgtagtcccagctactcgggaggctgaggcgggaaaatcacttgaacgcagaaggcggaggttgcggtgagctgagaacgcgccattgcactccagcctgggtgacagagcgagactccgtctcaaaaaaaaaaaaaaacttccaacggggtgaatttcaggaaaaaaattaaaatctgtgtcttacattccatttgttaaacattccctggagtgtgtgtcgtttctcagatctgttattttctgttttcttttattactattatttttttgggagctctgttgcccatgctggagtgcactggtgcgatcacagctcactgcagcctccacctcctgggctcaagcaatcttcctgcctcagccttctgaacacagggactccaggtgtgtgccgccatgcctaagcttttgtatttttttgtttctagggatggggtctcattctgttacccaggctggtctcgaactcctgagctcaggtgattctccctcctcgaccagccttgttcttttcttttgaatgacaataaataggattccagggcctaaacttcaaaatgttactggggagaagagtctcagagaaacagagaaaatctcctttccaccatacgtgcagaaaaatgaatacattgccacgaaacatgttgcagataaattatacaaatttaccaaaatatgttattctccttgacatggtagagaatttttgacggtggatgattctgttctgcttccaatactgcagtacccttaccttaattctataatacattttttgttgttcctgaaataggtagaatacaagatatttttcttgtttagatgacaatttgtcccagctccttatattaaagtgtttatcctctgcaatgccggccctggcactgatcagatttccccgaacacaggggctgcctcagggctgtgtccctttactttgtttttttgttttgttttgttttgagacagggtctcgctctattgcccaggctagaatgcagtggtgctgtctcggctcattgcaatctctgcctactgggttcaagtgattctcctgcctcagcctctaaagtagctgggactgtaggcacctgctaccatgcctgcctaatctatctttcttttcttttcttttttttctttctccctctttcctttctctctctctcttttcttttttttttttttttttttaaagagggagtttcacccttttcgcccaggctggagtgcagtggcaggaacttggctcactgcaatctctgcctcctgtgttcaagcaattctcctgcctcagcctcctgagtagctgggattacaggcatccgccaccacgcccagctaatttttgtatttttagtagaaatgggctttcaccacattggccaggctggtctcgaactcctgacctcagttgatctgcccgcctcagcctcccaaagtgctgggattacaggcgggagccactgcacctggccatttttatgtatttctagcagatacagggttttgccatgttggccaggctggtctcgaactcctgacctcaggtggcccgcccgcctcagcctccccgagtgctggaattataggtgtgaaccaccatgcccccaaccagggtgttttaaaattggcggctggtcacagaggtcccctgtgcctggctgtgccaagatttcagacacccaggaggaaagcagatctttagggtaaacacattgttgcataaacagtttcagcacaataagcaactcctctattgggatgagaaccctccccaaatccaggctagcttatgccagccaagggccaactttgcaggcaggactttctaaggttaggggccctcaggcctttgggttggctcttcctgcgtccaccccctagcccactgcacaggtgtctctaccacagaattattatgggaggcccctatgaagtaggaggagaccacactgcagtaatgatttcacttgtgctgtttagggctcctggacttagccaggtaaggtaaattccattggctgcaatggaatcattatttttttaatttccatttttatttcagattcatgggcacatgtgcaggttacaagggaatattgcatgatgctgagatttgggcttccattgagcttgtcacccagatagtggacatggtagccatgaggaagggtgtcagccctttccccctctgtccctccatttggaatccccagcgtctattgtttccagttttatgtccatgtctacccaagatttacttcccacttataagtaagaacatgccatatttggttttctgtttctgcatgagtttgctgaggataatggcctccagctgcatccatgttgctgcaaaggacatgatttcgttcttttttatggctgtgtagtattccatggtatagatggaccacattttctttagtgcactgtctttggtcacctaggttgattccatgtctttgctattgtgaatgctgctgcagtgaacacacaagtgatgtgttttttggtagaatgatttcttttcctttgggtagatgcccagtagtgggattgctgggttgaatggtggttctgtttttagttctttgagaaatctccatactgcttttcatagaggttgtactaacttacattccctccaaccatgtgtaagcattccctttcacagccctgccaacatctgttattttttagctttttaataacagccattctgacgggtgtgagatggtatctcatcgtgctttttatttgcatttctctgatgattagtggtgttgagcattttttcatatgcttggaccacaaaggtcttagaaagccaggtggcttattaagtttctgtagtattctcttccttcccccgttactatttttttactggagagaggcaccaattcctgcacagcataactctggccagtaagtcaaacttagacctgggtgtcttccagggacaaggcagtgccctgagtgccagggtaagtacaaaacaagtccaaccccctaggggacaggtagtcagtccccttggaagcacattgtttgcaatggtcgggacaccccaagcaggacttaacattggtcaggcagtcgggttagcagggctcccagtgtgacctcccactgtgggcctcctgtcctagggttctcagtgtagaccgaataattcagtttagtcctcagtttcagaggctctgcctgaggcatcattttcaagcagttttgcatgtctgtgataccagttcattgacctctccagtatggacgacacctggagatgtcctttgtgggaagttcaggaactggggccacttgctgctgtctcagggttgtcggatgtgatcagaggcttagcagccaacctgaattcagagcactcacagctgcatgcaacacttccttcaggaagaggggagcgcttcggtcacagctctgaatcagacagttccatccaaggtcaagccagtccttcactgtgggcaactgagtgagccacatggaccagccagcacccctgatgtttttcgtagttcagggccttacccgggagtgtctaactctgcagtgtttcctgaattagagtcctgttcattgagcctagccctgctgtcaggtcagcatagtgaaggctgagttagcagtggacatagtgaggatgaattagcagtgggcagtgtcaggttttagcttacagtcaagtccacgccgttgggatctgagttcagaattccataaaacaccgaaggctttgcttctgcagcagtaaagctaggtattgccgggttggacagctgtgttccaagatcaagttgcaagcaagagtttcctaagcgcttttggtctcgtgaatcttagagtccaaattgacagttaaaaatatgcacatgtggtttgaaaaccatcaactcttgaggttgtcagaaataggttttcataagagcgcattaacaaactagaaactactacttcacattccaaaagtgtatctccacttagagattgcctctcttttcatttgtttcccttttccctgaacctccaataggaaaaatgatagtaaaaaatcagttgtggagacctaatcttaatacttagagtttaaattccaatccatacaccaggggcaaagagcaaagaagttgtgtctgtcacttaaaaaaacaaaacaaaaaactgattgagatgatccctgtagtgcttttaaagtgacaaatattttaccattttctctcatttttatcacacatgccgatgcggtagtattcctcgtctcttagagcttctggtagccccaagtgttcctttgcttgtggcaccataattcagtctctccctccatcttccacgtggccaccttccgtgtgtgtttctgtcttcatgtgacattttcctcttataaagacaccagtcagcggaggggggagggatagcatttggagatatacctaatgttaaataacgagttactgggtacagcacaccaacatggcacatgtatgcgtatgtaactaacctgcacattgtgcacatgtaccctaaaacttaaagtataataaaatggttaagatggtaaattgtatgctatatgtatttaccacagttaaaaaattggagaaaaaatccttggaatatagtagatgcaggttcaaatcctgccttcagcatttattagctgaactgatgctaataaagttacttaatctgaaaaaaatttaaaaaaaataaaaaataaagacactagtcatattggagtagggcccattggattagatgatgtcattttacttgattacatctgcaaggatcctatttacaaataaggttatagtcacaggtaccaggaattaggacacggacatatctttctgggggaccacgtcacaagaaaccgctggcagttcagcatttacagggatagcattatgctagcagggaagaccatggctggtcaggaggtaaaccaaggggaagcagggaacactccagccttttttttaaccagcaacaggttttaaaaaagcacggagtgtcccctgcctccccagggtttacctaaagttgtgctccagccttggtaattaactttcttttccctcccaatgcaacacaaacttttaccattttcctcacccaaagcttacctttcagaacatgggggccctttctcctacctggagaagaaaacaaaaaccaaacgctgctctttgttttcttttctttttttttttttgagctggagtctggctctgtcgcccaggctggagtgcagtggcgccatctctgctcactacaagctccgcctcccgggttcacgccattctcctgcctcagcctcccgagtagttgggactacaggcgcccaccaccacgcccggctaatttttttgtatttttagtagagtcggggtttcaccgtgttagccaggatggtctcaatctcctgacctcgtgatccacctgccttggcctcccaaagtgctgggattacaggcgtgagccaccgcacccagccacccaggattttttttagatgaagtcttactgtgtttctcaggctgtagtgcagtggcacgatcttggctcactgcaacctccacctcccgggttcaagctattctcgtgcctcagcctcccaaatagctgggattacaggcacgtgccaccacgcccggctaattttgtatttttagtagagatggggtttcaccatgttggccaggctggtctcaaactcctgacctcaagtgatccgcctgcctcagcctcccaaagtgctggggtgacaggtgggagccattgcatctggccagtacccaggatttttattgctggctgatcacataagcatcccctgcctggtatgtacacagattccatttccagaaggaaagcagctgttcagcattaacagtggtatttgcaccatgagtaatctgaattagggtgggggtgaaccttcccaaaacccaagttcccagacaccagctaagggcaacattgccagaaagccgttctaaggatagagtctaaggcccgcaatgttaacttctttcggcatatgggaactttattattaaaaaacactgcaaatacactgcactatgagcaattaaggctaacccagggagctcatattgtcccctgtgccagtaggagggtcctgtagatactctgcagctctgtgaataggactgttctagcatcagaattgctgcgtgacagtattttgtctgtctcctgctcatagacggaaaggagttgatctttctcagcaggtttgagggaaccgtgcatctcgggggttccatgcacctgtgcccaatatgcaatatggaaataatgagaaattgagagtgcagcctctagagtggtatgtggggaatcacttcctcctggaatttgagacacagaattttctaggaaggcactattttgtctatgtcttttataaccattgaaaattcgtagtcaaatggtttggacttcagttaactcctttgcaaagtgggactcttaactttatccttaaggttagcaataatactttttttttttttttttctgagactgagtcctgccctatcacccaggctggagtgcagtggcatgatcttgatgcattgcaacctctgcctcccgggttcaagcaattttcgtgcctcagcctcccaagtagctgggactacaggcgtgcaccaccatgcccggctaatttttttttttttttcagtagagatgaggtttcaccatgttggccaggctggttttgaactcctgacctcaaatgatctgcctgccgcggcctcccaaagtgctggggttacaggcatgagccaccacacttggcccaagaatactttctttcggctctggtgaaaagagctgttttggcattgtgtgcacctcgctctgtgtatacttagtgagtgtgcctgtgtgtacgagagagagccagcgtgtgagagagagagaacccagaattaattgttgggcttccgtcactgaggctcgaagtatagggaatgtgtggaggtctacgttctcgtgtctttttcctctttcctaaggtctaatttctcaataacttctagtttccaagttaaaatcaatacttctcaaaagaatgttttcattcagccagttggaccaggagttctttaagacgctatggctacctggcccttatgaaggaaatagaagggaatgttcccaatccttcagtgtttttatcccataaaacttcagttttgaccctgtgctttgtgtagtgccgaatgatggtgtgtgcagcaggggaggagctaaaacggtttgtgtgacaaggcactgatggtcttaaaatacaagtatttgtttcacttatatagcatttgtttgatatctccaatgtggtctgaatccttttgatagagaataatgtcttcagttggtcccagtaaaagtatagagagaaattcagtgtgttaatggtcctgtgaaatctatgaggaagtgagtgtagacaggaaggaagaggtgtgacaactgagtcacagggtagatgtcagggaatcacagaatcttgtttgaactacatacgaattgagtacaatgctcctgggctctcggtctcaaccatcctcccataaatatgttgaattgttttaggactcagtggtctttgaggatgtggctgtggacttcaccctggaggagtgggctttgctggattctgctcagagggacctctacagagatgtgatgctggagacctttcagaacctggcctcagtaggtaaggatgacatcattccttccttcacgtagttattgagagaacaagtatttcttacacatcagacctgttccaaggcttggaatgtggaaagggaataaattggtaaataagacagacatagtcacagctgtcatagagctagaatgtaatgtttttccatgagaatgagaatctgtatttcagctttttatttttgtagagaaagctcccttcatgtcgtcattgtggatatagctttgataggcctagtgaaatttgtttgtgcaagccagtgaaaatttgatttttttttttttttttgagatggagtctcactctgtcgcccaggctggagtgcagtggtgtgatctcgactcactgcaacctctgcctcccgagttcaagcaattatctgcctcaggcgcccaagtagctgggattacaggcgagcgccaccatccctggccaatttttgtatttttagtagagacggggtttcaccatgtcagccaggctgctcttgaactcctgacgttgtgatccacccgcctcagcctcccaaagtgctgggattacaggcatgagccaccgcgcctggccgtgaatttttttttttaataatttttctatgcttactaatactgtgttgattgagttgcttacctttttgaccattttgtgtttaatgaagtcctgagatagctaaactcctcagtgtcgttttccgctaacaagtgccttcttatatgatttgtttactttttggtttcagatgatgaaactcaatttaaggccagtgggtcagtttctcagcaggatatttatggagagaaaatacccaaggaatctaaaatagccacgttcaccagaaatgtttcctgggcctctgttttaggaaaaatttgggacagtcttagcatcgaagatcaaaccacaaaccaggggagaaatctcaggtgagttgcactcacaagagaacatagtatttcaggagagaatcttagtctgtcattaaactttaaaaaagcaagcaaacagaaaactcatccaagcctagctccaatttgtttaatccacagaatttttacaaaaaaatatttctttaaatgtgacatagacagtgagtgacattagaaacataattcagatggaaaccattatcaagaaaccctaggccaggtacggtggctcacacctgtaatcctggcactttggaaggctgaagtgggcagatcacttgaggacaggagttcgagaccagcctggccaacatggtgaaaccctgtctctactaaaaatacaaacattagcagggcatggtgccgcaggcctgtaatcccagctactcgggaggctgaggcagaattgcatgaacccaggaggcagaggttgcagtgagctaagactgcaccactgcactccagcctgggtaacagagtaagactctgtctcaaaaaaaaaaaaagaaagaaagagaaagaaaccctatacataagaaacactgttttaataatggcagtggtcaaaccatcttccagggcattcagtttatttcattttcagacagttcccatggggtgaaaaacctatgctttcactgaaaatggttaagatgcagtcctaatcctaataaatactaacaaatcattattaatcaaaccaataacatgcttctcatttttagtagaaatcatgggttggagagactctgtgaaagtaatgatcaatgtggagaagccctcagccagattccacatcttaatctgtacaagaaaattccacctggagtaaaacagtatgaatacaacacgtacggaaaagtcttcatgcatcgccgcacatccctcaagagtcccatcacagttcacactggacacaaaccatatcagtgccaggaatgtgggcaggcctacagttgtcgttcacacctaagaatgcatgtgagaacccacaatggagagagaccctatgtgtgtaaattatgtgggaaaacctttcctcgtacttcctccctcaatcggcatgtaaggattcacactgctgagaaaacctacgaatgtaagcaatgtgggaaagcctttattgacttctcaagtcttactagtcatctcagaagtcacaccggagagaagccatataagtgtaaggaatgtgggaaagctttcagttattcctcaacgtttcgaagacacacaataacacacactggcgagaagccatataaatgtaaggaatgtgcggaagcctttagttattcctcaacttttcgaagacatatgatttcacacactggagagaagccacataaatgtaaagaatgtggggaggccttcagttattcttcggcttttcgaagacacatgataacacacactggagagaaaccctacgaatgcaaacaatgtgggaaaaccttcatttatctccagtcctttcgaagacatgaaaggattcacactggagagaaaccctacgaatgcaaacagtgtgggaagaccttcatttatccccagtcctttcgaagacatgaaaggactcatggtggagagaaaccctatgaatgcaaccagtgcgggaaagcattcagtcacccctcctcctttcgaggacacatgagggtgcacactggagagaaaccctatgagtgcaagcaatgtgggaaaactttcaattggcccatatctttacgaaaacatatgagaacacatactagagagaaaccctatgaatgtaagcagtgtgggaaagccttcagcttgtctgcttgctttcgagaacatgtgagaatgcaccctgaagacaaatcctatgaatgcaagctatgtgggaaagctttctattgccacatatccttacaaaaacatatgagaagacataccgcagagaaactctataaatgcaagcagtgtgggaaagctttcagttggcctgaacttttgcaacaacatgtgagaacgcacactgtagagaagccctatgaatgtaaggaatgtgggaaggtcttcaaatggccatcatctttaccaatacatatgagactgcacactggagagaaaccttatcaatgtaagcattgtgggaaagcattcaattgttcctcatccttaaggcgacatgtgagaatacacactacagaaaaacagtataagtgtaatgtaggacatcctcctgcaaatgaattcatgtgcagtgcttcagaaaagtcacaccaggagagagatctgatcaaagttgtaaatatggtgttgcctttatgagttccttatcctgaaagtggacactcaaggagtgtgtctgtagttcatttgcaaataaacatttagttgaaaaataattctccaaatactctcagctatcctacatgaatttgaacaggtagtttcttacgattcagtaaataaaactttcatcttagagtgttttggactcatggatgatttgaagtgtatttttaatatgcaagtaggttcaagttttatttaatttcttaaattgtaactgacttagtgtgacaggtattggatattacgtatctattatattttccaccttttttactgggagtatttttattgtttggccagaggagccttattccattttttaagaagtagttggcagaattttgtaattatgcaaagttgtttaaggagtatagcctcaaatgaattgtaatttttaatgtttgcccattgctgtttgtctttgcttgtgattgtgaattggacagtaggctttgacttgtgatgtgacggagaaatccagagttgcagatagttcttctgcattgttgtcagtgtgggtagtgttaggaacttcatttgctggaatgcatttcctttatggttccatgtccaaatttaccaatagcaataacttgaatgaaatttagaatgaagaagaagtaagtcatcgctgagcttttggggtcacattaaatggagatggacagatgcataggggctttgtgaacatcaaccttcagcttattttccagattcttattcctgccaatcaagagtaccatcaaaagaaacacttaagtgcttgatttccactgtgtcagaggtgtagtcttcctcagacatctccattaacttgatattagggatattcctgtgtggtcagtcacctagagtctggatttttctcaaaaccctgcatgacctcttgaccactgattcagactgtcttgtttggcagtctctgagcttctgattctcccgttctgtagatcttaacatatttgcatggggtctaatttatatagtgaacaccttgttatcttaatacttccagtggctctgtgatcctgattccaccacgaaagccacagtgttgcagtcaaagaagaaaaacaacacatgggactttgtaccctattgcatttttaagtgtgcctgccgagtcctatgtgagaacaaataccttcctcatatattagatttagggagatttctgttactcagaactaaatgcagtttcttgatataggttaaattattaggtttgattatgtatcattaaaaataatgtggattttgtttcaaggaaaaccttctgtagatatttcttagaaatatcctgtttagctgggcacagtagctcatgcctgtaatccctgcactttgggaggcttgaggtcaggagtttgagaccagcctggttaacatggtgaaaccctgtctctactaaaaacacaaaaattagccaggcatggtggtgagtacctgtaaccccagctacttgggaggctgagacaggagaagtgcttgaacctaggaggcggaggttgcagtgagccaagatcacaccactgcactccagcctgggagacggggaaagactccatcacacaagcaagaaaagaaaaaaaaatcctatttactgtgctttcaaattagttgtttagagactatattaatttcccagggctgccataacaaagtacaaaaactgggtgacataggaaaacaaactttttgtttctcagttctggacccagaaatccagaaacaaggcattggcaggaccatgctttttctgaagatgctagggaaggatctgtttcagaactcacctagcttctggtagttccttagcttgtggcagcataactctaattttcacatggcattctccctgtgtgtgtgtctctccatgtgacaatatttttatacatacacaccactcattgggttaggccccactctacttcagtatgattttaccttaactaattacattggcaacagctctcttttcgcatactgaggcaccgcgaattaagatttcaacgtaaaaattttaggagacccaattcaacccataacactaagaaatgttattttttgtttaccgagagaattacagatttcaaatcaactttgtaattttgataatttaagcatgttacattttgaatcagtattaccaagtatatacaaatacaggtattttttcatataaatgttatttttaattgctgtatacttaacatttgccattaaaatgattttttttttttgagacagagtctcgctctgtcacccaggctggagtgcagtggcacgaccttagctcactgcaaccttcatctcccaggttcagttgattctcctgcctcagcctcccgagtagttgggattacaggcatgcaccaccacacccagctaatttttttatttttggtagagatggggtttcaccatgttggccaggctggtcttgaactcctgacctcaggtgatctgcccaccttggcctcccaaagtgttgggattacaggcatgagccaccacacccggcctaaaatgatttcttatttgtggttaataacaattaaaaagcggaaataatggttttgtcaaggccctctacccagaaaccaccaggatcacactggtagtcaaagaaaatttgctgtgttgagttgaagtttgaacacatgatcaagaaagggctgtggcttgtatcagagggtgtttaaaaggatttactatcagatttggccttgtgttctgtgattttggtgagcgttcaaggaagccaggctttggtctggattggatgttctcaggtcatgaatataattctctgggaactcccaaagttctcatctacaaagcagaagttaattggagctgaaaactaatcagtaaagccacagcagccagtcatatgggggagaagaggggaatgtttgatggtttttgtggtttagaggtgagttccggaaaaaaagaagacatgtttgacatcctcaaacgagaaaatttttcatgtgttttataggccaaggaggcagaagcttttgttttaatgagccagaaagccccaaaagcctatttaagttttctcaggtatcatttcaacctctgaacttccagaattaactagggaagaggaaaaacatgtaacaccttagagttttattaaagagcaaacaatatccagtaatctccattactttccatgttaacataagttttcataacgctctatagatgaatgtgatttggcagtcacttgtatttcttaacacccacttacccatcattccctcttagatgaaaaaagttaagcacggggacaacagagtcttgtatattcatgtagctcatgatgatggaatcaagtttgaaggcttaacctgtgcttaacctatattgggcattgtcaagacttaaatttagaacactggaaagcaagtataattaattttacaaatagggcatcaaattttacaaagactcctaaggctatatggtattccttttataagacatggaaaaggcaaagataagggaaacgaacaaatcgctggttagaagtaggggatttgagtacatatgggcttaagagtgttctgtcatgattgtagtggtgaaaacaagcatttgcaaaaactcataaggctactcttaaaatagcaaattttgttgtatgtatattttaaagttaaacaataaaaatgctttcagtttattaaagaactcaagaccaggtgcagtggctcatgcctataatcccagcactttgggaagctgaggcgggaggattgcttgtggccaggaggttgaggctgcagtgaactatgatcatgcactgcactctacactgggcgacagagcaagaccctgtctcaaaaaaaaaggaatacaaaacattcctgaaacttgacatgtaagttcgcaataagacttttccctagctgggcgcggtgactcatgcctgtaatctcaacattttgggagactgaggcaagaggatcacttgaagtcaggagctagacaccagtctgggcaacatagcgagacctcaactctaccaaaaaattaaaaagtgagccaggcggggtggtgcacgtctgtggtcccagctacttggcaggctgaagcaggaggatcacttgaggccttgaggagccatgatcgtgccactgcactccagcttgggtgacagagcaagactgtctcaaaaaataaaaataaaaaaacaagacttcccccaccatcttggaattctctggaggaaatgtagggctggttgacaaggacttgtgcctcgtcagaccctgtttgaaacccagtctgaagttttgaaacacccacaagggccatacctgactttatctcacgcacataacaggagagaagaaggaggtcttccagaatctgtctttgagtttacaccaggttcttcccatctgatctttgggaatgctgtggttctgaaacataaaacggggaccctacacttcttcccaggaatatcctgcctgggagcatcctgatcctgtcttcagacaaggggcatccgcatcttgttttctagggcctttcctgaggccacttccagctccaaagttctcatctcaagctcagctctgtgtcttcatgctgggaaacgtctttatggatccccaaactcctcttgctgttgggaacacgtggcagccctgcgttgtgaggtgagagaagaggcagtggcagaacccatgccatggagacacgcccatcagccacagcagctcctgctactgcataaatccataggcacaatcacacgcctcacggtgtcaacatctcccatgacatcacaaagatgcccagctgggacccacctacagtgatggggtgatggggtttcacctataagcgggcaaacaggcactcctcctcactgtccagtcacctgacgtgctttttctgcgcactcaggtcgtgacaccccaggaggtgcctatcgcgccccaagctcctcacgtgcctcctccccacagtccaggacgcgtcttactaacgcctcaccagagcgcatgcgccctcctcaggagcagcctcaaagcgcgcagcctcagcccattggcctgcgggaagtggagttcccgaacagaagcccctcagtctccggaagccccgcccggcagactgttcccaggatgcaacacgggctcgcgtctaaaagagctgtgctttgttggggctatctgggagtttccgccttccatgaagtgcgcaggcgcacttaggcgaggcggggcgactctaggaagtggagacatcaagagtggtactggaagtggcggaagctctcctcttgccctcttcagcttccggtgtggtgggtcccggatatcgcgtggctgtggcaggtagacagcccgtgctccagaggccttcatcttgtgatggcagatgtacttgagtagacacgacagacggggaaggaccctgatggtccgagggaccttccacagcaagtagaaggcactgctgtgaatatgatggcgtcagaggtgactgcaaaaaaggacagggcagctgggcgaggaagagataccagtgatgtcctaactgagctccctgggtctggtagtgaggagctcagtcttagaatatgagccgtgtcaggggctacagcatcatcactcttgtcctgtcgcagactcaggctccctgttctcaggttcttatgtagacagtgagggctcagggaggctcccaccaccaccaccaccagcaccaccactccatcaaaacggctgaaggaccttcctttagggttcgggggatctcctccttccacaagggatggatgtgaagacaactcattctttgatgttcagatggttgtggccctctgatgagatgtgtgcacaccttgccaaatgcatatgtctgttgagcctggacattaagtatttcttgatgttcttctgtgtaacaggtgatgtcctaggtgctgcagtgaacagaagagacaaaatatccttgttcccttgaagctaatgtcgtaggggcccaaaacaaagcaaacaaacaaaaaaaaggaatgcaagtcaagtacactttgtatggacagtggtaattcctaagaaggaaaacaaagatggacttaaggggtgcagagggcctggactatgtgtgtctgtgggatagtctgttactacctctgggactctcatctcttgagtgtgcttgggtgtgtccaaccgtttttcctagtgacaaagtctgggtaattctgtggggacatatattggtgtatctgggaggtcccatgtgtctcagtggtggtccctgttttcaggaaagagtgtctgtgaatgtccatgtgtctcactgcacagctgtgatttttctgtgtctctgtgttttccagtctttgtgtgatgaaatataaaggcctagcaggctcagagttattaatgaattgtacttaagcgttgagaggcatatatttattgcactattaaattcttccaaaatatagttaaaaaaaaaagcttcacagttttttagtaagtttgagtgaatttttttttcagggagtggggaacagagtctccatccattgcccaggctagagtgccgtggtgcagtctcagctcactgcaacctctgcctcctgggttcaagcgattctcgtgtctcagcctcccaagtagctgggattacaggtgtgtggcaccatgcccagctaattttttgtatttttagtagagatggggtttcactatgttggccaggtgggtctcaaactcctgatctcaagtgatcttccacccacctcagcctcccaaagtgctgggattacaggcgtgagccactgcgcccagcctcaagttgattttttaaagtttggcattcattgtttatttaaaaaacaacaattgggcagggaccagaggctcacacctttaattccagcactttgaaatgtcgaggcaggtggattccttgagctcaggagttcaagaccaggctgggcaacttggagataccccatctctgcaaaacatgaaaattagccagatatggtgaggctcgcttgtagtcgcagctaatcaggaggctgaagctggaggatagcttggacccaggaggtcgaggctgctataagccatgattgtgccactgcactccagcctggaaataagagcaagaccctatctcaaacaaaccctatctcaaacaaacaaataaaaacagccatattttattttaaaatatgtatcaaatgaattattaacaggaagcctattttctaaatggtaatcctttaaacactaatttttatgaaagtggccagtgctttttgtaaatcataaaacatgagtgttttcttcaatttgatttgtaaataaataatatcagagtttgcacttcccttggttcttaaatagaatattttcagaaatgggagcatataaaatgcatcaggagtgttgaccgaatttcctagtgattgatggaggccagccaatcctcagttgcacctcagagcctgccattaaatttaaaatagaagatgagaaactaaacttctcagttgacagtggtccgactttctctgccagcttctcagaggactcatctctactgtcacttttcattcttttcagaaaagctgtcagagtctttaggcaacctgtttcatcacccatgtctcaggccacaccaatatcctcagttctgattaacactcattatagctttccagtttctgaagcctcaccggtaaactgtctaggtagtgatttgctacataaatttaatgccatcatgcaatgtaatgggaaaggtgtttttattcccctgacctgagaccaaacttcaaactttctattttccctaattgagacttgtcctctgaagaggatgcaacctcaagtgatgttccaactacttctaatgactgatgttccagttagactctgggcctcatatgcaaaggaagttgcattgctgcagagcgcagagactgtgcacgttgcctggaaaaggaataagccttttcttttttttttttttttttttttttttttttgagatggagtctcgctctgtcgcccaggctggagtgcagtggcgcgatctcggctcactgcaagctccaccttctgggttcacgccattctcctgcctcagcctcctgaatagctgggactacaggcgcccaccaccatgcctggctaattttttgtatttttagtagagatggggtttcaccgtgttagccaggatggtctcgatctcctgacctcttgatccgcccgccttggcctcccaaagtgctgggattacaggtgggagccaccgcgtccagcctaagccttttcaatcaatagctcaatgccctctcgtgtcaatatgcagaacaaggaactgaatctatactagactttattacagcacagtgtccattatctttactttctcccactataataccccagtcttgcccgtaaagatgagaagggaagtttgactttgatgagcaccaaagttaccaattttacaaaatctaatagccataattcttgtagttcctcaccaccctacagttcccactatttttaccctagttcctgtgtctgcagcctggtttgcatgaatggacctctgctcagctgtcttttccattcctttgcgtcctgattcacagttcctctttgcacttctgtttagaggaggacagtgggtatggcctgcacacctcaggaatattgctggtaccccatccatattttcccaagtccttaaggcctactcagactttgtaacatttatccaaggctctactcgtgttcagtatactgatgatgcctttgtagccaaactaagcaaggtggtcttatggatttcctcattctcctagagacactagctgaattaagccataaagtctcccaatctaaatttcagtgggtgtagatagctattacttaggatgcgaggtatctcagggcacccaaagctcacccagaacaccttgaatcaattttatccatcgctctccgcaaaataaaagcaggtatgggccgggtgaagtggctcacgcctgtaatcccagcactttgggaggccaaggtgggtggatcatgaggtcaagagatcgagactatcctggctaacacagggagaccctgtctctactaaaaatgcaaaaaaaagctgggcgtggtggctcacgcctgtagtcccagctactcaggaggctgaggcaggagaattgcttgaacccaggaggcagaggttgcagtgagccgagatcgtggcactgcactccagcctgggcaacagagcaagactctgtctaaaaaaacaaacaaaacaacaacaacaacaaaaagatatgtataattctaggagcagctggctctcttcactgagaattcctacttttgctcctttgctaaacctctgtatgccgtcctctcacgtgctgcctcagagcctagtatctgcccctcagagatattgaccttctttgtttttttttttgttttgttgttgttttcagacggagtctctcaggctggagtgcagtgtcgcgatctcggctcactgtaagctccgcctcctgggttcacatcattcttctgcctcagcctcccaagtagctgggactacaggtgcccgccaccatgcccggctaattttttgtatttttagtagagacagggtttcactgcgttagccaggatgctctcgatctcctgaccttgtgatccacccgcctcagcctcccaaagtgctgggattataggcgtgagccactgcaccttgcctctttatgcactcttaacctgtctcttctcattccttcgtcaccactggactttgggtaccctacgggtgatgttaaggctggtccccaacaattgttatttgtggaaactttccagtacccacgtatagccagcagcccctttaagggaacataactctccctggctggccaacaaatagcccggagccaagcagtcatcagctgtcgagtctgccagggagcgttgtccttcacggaaagcatctaaagcattagctctctgctgcgtgtggttagagtgtgctgaacgttttccgatggcttcatggtttgagttgacaggatgacatcatgtgtgcctaaggcagtgcccgtggtggcccaaaaagtatgtgcaatgagcagaaaattagcacacttgtctcaagaggaggtttgggagtgggtgtgagatggagcagggactccctcttcacggcctgtggatctcccaggcatagaaataaagaacaatcttgcttttcttcaaggtaaatttcagtcacctagttagccccaagaagtaaatatgcaacttgataagcaagaaggtaacggtagcctaaaacaatagccaaggaagctagaagcatcggatgtgtagttctcctgtagaaactaaagatggtggccgggcgcggcggctcacgcctgtaatcccagcgctttgggaggctgaggcgggcggatcacgaggtcaggagatcgagaccatcctggctaacacggtgaaaccctgtctctattaaaaacacacaaaaaattagccgggcatggtggcaggcgcctgtagtcccagctattcgggaggctaaggcaggagaatggcgtgaaccctggaggcagaacttgcagtgagcccagatcgtgccactgcactccagcctgggcaacagagcgtgactctgtctcaaaaaaaaaaaaaaaaaaaaaaagaaagaaaaagaaaaagaaagaaagaagcatgtgttatgggttgtactctaaggtgccagtaagtctgatgatcaggacaaagtagggggccctaaaggctggggtcgagcctaagtaaagctgcacacagtggagaagacccgtttagaagaccatgtgtggtctgtaatgtcagcaaggtttgtttgagccatcagttctaggaggcctctagcccgagagtataagagagcagaaagttgctttgaacgccttgttcaagagcccagcgttggccaggcatggtggctcatgcctgtaatcccagcactttgggaggctgagacaggtggatcacgaggtcaagagaccaagaccatcctgaccaacatggtgaaaccctgtctctactaaaaatacaaaaattagctgggcgtagtggcgggcacctgtagtcccagctactggggatgctgaggcaggagaaccgcttgaacccgggaggtaggggttgcagtgagctgagattgcaccactacactccagcctggtgactaagcgagactccatctcaaaaaattaaaataaaataaataaataaataaataaataaaagagcccagtgttgtgttggaacaggaattaaaacagattaaagaatgtgtaagcagaaactcagttgtatgtaagaaaacccaattccccctgagaacaagaaagagctggagtcttttaaaaattaactgcctgtttttctgtggctagtgagccttatctctcctcccttcccaggcattgtgaaggccctgtttccctagttgtgcagctgcaagttcactagacagataaactcaagttgcaaaacatgttttgccttgaaaagtaagaaatgatgtaatgcacgtctcaattaattgaataactctctttgtctctcgcttctgtaatatgcttccccctgcacagatctcccccggccccacaaaatgcttcaaaggtaacttaactctttgttcagggctcagtcctttgggtgttaatcggactgggctggtgcagctaaataataaatatcctcctgaaccccatcggtctctctgattccttatcaatctcgctacagtgtcgtttgagaaaagaactgagcaccttgatcactgtcagtagcatctgtaaccccaagggaagggcgggtcttggtgaaaccctgtattgtggctcagcaggagaacgtctggtgggattggtaaggaatatttgcatttaagtggcttccgtgatcacagtatacggaatagcctctgcaaaggtgggcggggaccctataaaatctatttgctctcagccctaccaacaggcttccagggattatgcctccttgattatatgtcatttgcctgtagactattcatctgcctgcacattgagcgctcagctgtggtgtttgagttttcataggtacacagatattcgtgaccttgatttttacttgagaaactgtgaggcaaaatatccccagagtgctttaacctcaaaatattgacctaggatacagttgttgccacagttttttttaagtgtgttttcggtttttttgttttgttttgttttctatgtttttgttgttgttgttgtttttgagacggagtttccctcttgttgcctaggctgagtgcagtggggcaatctcagctcactgcaacctccgccttccaggttcaagcgattcttcccccttagcctccgagtagctgggattacaggcacccaccaccacacccggctaattttttgtatttttagtaaagacagggtttcatcatgttggccacactggtctcaaactcctgacctcaggtgatccacccaccttggcctcccaaagtgctgtgattacaggcatgagccaccgcgcccggctggctagaccattgctaatggctcaagagttcagttctagcaattgtgctgaccctagttagggaatggtaaagctttcgttggtcactcacttgaccccatgggcctccccaggtgtctactggtcaggagagagaggggacctcctccagtgtcatggaatctgacaacagactgaggacagaagaagctgcttttttctacggtggataccccaagggcccaggtttccctctaagtcagtaccactttcatttcaggaaggagaccaccgtggatgggggctgctgcctgcaggacccgagacctgaaaactgaccaatcaggcagctggggtggggcctagagaactgaccaatcaggggagttgaggtggagcatccggatgagaactgtcaatcaggggggttggggcagagcctggagacctgtcaaatcaaaggagctgaggcagggcgtggaaacatgaccaattaggaaagctggggtggggcctgaagaactgcccaatcaggggagctcaggggatagcaagctgaccaaccagaagaggaggggcagagtctaaagaactgtccaatcaggggagttgggatgtgactggtgaactctccaatcagagatgagcagagaagagaaccatccaatcacagccccaggggcggggcgttgctgtcctccctgcagagcacacccggcctgccctgagtgaccacaggtgtccccgtcgtgctcacctgcaccggctgcgaggagcagggagctcctcaaagagctcaggaacggacaggacatggtgagtgcagggcaggagccgagccggagccggagccctgggaggggagggttggaagcggccagaacacgctgaaactcccgggggagccgcccggaacccccatgcagcctctgtccctgtgtcacccccgggtcctgcggggagtttcctcccctgccccagtcttcattccctggaaagtcgtagttgtcaggacgctgggatggaggggaaaaaaaggcagaaatgactcctgccctgtggggtctcgcgaagttaattggaagaaaaactaacccaaagtacaaaaaacaaaacaaaaaaaaaaaaaacctcaccccagcgaggcggtgcaacagccccaaagcagaatgcgctttggatgcagactttgggcccaggcccacgtccctgggaggggcgaggggtggacaggtggtgcgggcgctccacgtggcggcacgggctggcctgaccccaaaggcccgcaggccggactccagcccagccgcccctgcctgggcctctctccttctaaagattgatttggttacttgagcctcagattttttcagtcaatggaacatacagtaaataatagagtttgaaagataaaatatttccaaggaggtgaatttcagaaaaaaataaagttctcgtcttacattccatttgttaaaaattctagcgtgccttttttttttctttttattttctgttccttttttgcccgtgtggttaagtttctcacatctgttgttttattttcggtgatgacaaatgggattccagggcttagcccttgacggggctcccgggaaaaagaatcgcagagaaagagagaaaatctctcttttattatgacacgccccgaaatgaatacattcctacaagaaaaaaatgtttggtatataatttggtgaattacaaaaactcgctaaaatatcagttattctccttttccaggatggagaatttgtgatagatgataattctgttcttttattttttgtttttattttttgaaacggagtcttgctctgtcacccaggctggagtgcagtggcgcgatctcggctcactgcaacctccgcctcctgagttcaagcgattgattctcctgcctcagcctccccagcagctgggactacaggtgtgtgccaccacgtccagctaatttttgtatttttagtggagacagggttttaccatgttggccaagctggtctccaactcctgacctcaggtgatccacccgccttggcctcccagaatgcttggattacaggcagcatgtgccaccatgactagctaatttttttttttttttcagatggagcctcgctctgtcacccaggctggagtgcaatggcgcgatctctgcttactgcaacctccgcctcctgggttcaagcgattctcctacctcagcctcccgaatagctgggattacaggcacgtgtggccacacccagctaatttttgtatttttagtagagacggggttccaccatgttggccaggctggtctcgaactcctgacctcagctgatccacccacctcagcctcccaaagtgctgggattacaggcgtgagccaccacacctggcccctttatcactcttttatattcactcatagggatatattgttagtgttcattaattccactgcttgctagtgactattcgggtattttcaaattttttccattgtgaccagtgcccctaaagacattattacatgtgtgtccacttgaatgccttattctcagctgcactgcagtatatcctcatcctctccccaagagcctggtccacatattaccgcctacatctcagttgctggtaactccattattccagctttcctgtgtgaaataattagtcttccttgattcttcctgctctgtcttgccccaccttgagcccatgaggaaattttatatctcctctttttttaaattttttattttttgagacggagtcttgctctgtcaccgacgctggagtgcagtggcgcgatctcagctcactgcaagctccgcctcccgggttcatgccattctcctgcctcagcctcctgggtagctgggactacaggtgccctccaccacgcctggctaatttttttgtactttagtggagacggggtttcaccttgtcagccaggatggtctcaatctcctgacctcatgatccgcccacctcggcctcccaaagtgctgggattaacaggcgtgagccaccgcgcccggcctagatctcctcttatgctgctcttgcacaggactgcactgtgacacccaagctgacacgcctacttctcatctagtgcggctttcgcctcctaactggtgtcccggtgtctgtatgtgtcccctatgatctagtctcagctgtcagatgagatcactgctctgtgcaaaggcctggaggagtcactcagagccaaagtccttactgtggctgatgagttccccacaaagtgatgtgcctcacttcctgtcactcgaccccccttggctgtcactccccattcccctctgtccagtcacacaggctctggctgtgcctgaaagagccaagacccgctccttccatagggcctaacctctggctgtttctcccacccagaacaattttctcctttctatattttttcattgtatactacattcgccatgattaatttaaattggatcacatctgaaagcttctcttgtcgctaatttcagggaacagatgacattttactattttgggttgggcccccatgcctgtaatcccagcactttgggaggccgaggcaggtggatcagttgaggtcaggagttcgagaccagcctgaccaacatggtaaaaccctgagtctactaaaaaataataataataataaaaattagccaggcatggcggcacacacctgtaatcccagttagttgggaagcaggaggatggcttgagcccaggagttcaaggctgcggcgagttctcattgcgccattgcactccagcctgcacagcagagtgagaccttgtctctaaaaaattttctggccaggcacgatggctcacgcctgtaatcccagcactttgggaggccgaggcaggcagatcacttgaggtcaggagtttgagaccagcctggctaacatggtgaaacctcatctctactaaaaatacaaaaatcagttggacgtggtggcacacgcctgtaatcccagctactcgggaggctgaggcaggagaatcgcttgaactctgaaggtggagtttgcagtgagccgagatcatgccattgcactccagcctgggcgacagagtgagactccatctcaaaaaaaaaaaggccgggcgcgatggctcacacctgtaatcccagcactttgggaggccgaggcaggtggatcacaaggtcaggagatcgagactatcctggctaacacggtgaaaccctgtctctactaaaaatacaaaaaattagccaggcatggtgatgtgtgcctgtaatcccagctactcgggaggctgaggcgggaggatcacttgaaccttggaggtggaggttgcagtgagccgagatcgcaccattgcactccagcctaggtgacagagcgagactctatctcaaaaaaaaaaaaaaattctaaagactatgacacaggataaagaatatatgaaaacacagaggttgcagtgagctgagatcacgccactgcactccagcctgggcgacagagtgagatgccgtctcaagaaaaaaaaaagtatatgacatacacatatatacagttaaatgttattcagtcataataaagaaggaaatcctgccattggtgacagcactgatgaacctggggcacattatgctatgtgagacaaaccaggcatagaaagatgaataccggatgatcttacttacatgaagaatcaaaaagaaccagattcctagaggaagagagtagaagagtgattgcctgcggctgagggacaggggaagtggggagagatgttggtcaaagtgaaccaactttccattgtaaggtgaataaattctctacatccagtgtccaaatggtgactgtatttaaggatactgtaatgtatacttgaaatacactgggcctggtgcggtggttcacgcctgtaatcccagcactttgggaggctgaggtgggtggatcacgaggccaggggttcgagaccagcctgaccaacatggtgaaaccccatctctactaaaaatacaaaaattagttgggcatgtatagggaccagccccacagggtcggtgggtttctccccatgtgcagagacaagagagcgtagaaataaagacacaagacaaagagataaaagacagctgggcccgggggaccacaaccaccaagtcgcagagaccggtagtggccccgaatgccaggctgcactgatatttattggatacaagacaaacgggcaggataaggagtgtgagccatctccaatgataggtaaggatgcatgggtcacatgtccactggacagggggcccttccctgcgtggcagccgaggcagagagagagaggagacagagagtgagacagcttatgccattatttctgcttatcagagacttttagtactttcactaatttgctactgctatctagaaggcagagccaggtgtacaggatggaacatgaaagcggactaggagcgtgaccactgaagcacagtatcacagggaggcggttaggcctcgggataactgcgggcgggcctgactgatgtcaggccctccacaagaggtggaggagtagagtcttctctaaactcccccgggggaagggagactcccctttcctggtctgctaagtagcgggtgtttttccttgacacttacgctaccgctagaccacggttcacttggcaacaggcgtcttcccagacgctggcgttaccgctagaccaaggagccctctggtggccctgtctgggcataacagaaggctcgcactcttgtcttctggtcactcctcactatgtcccctcagctcctatctctgtatggcctggtttttcctaggttatgattatagagcgaggattattataatattggaataaagagtaagtactactaactgatgattaattatattcatatataatcatatctaagatctatatctggtataactattcttacttgatattttattatactggaacagctcatgtcctcggtctcttgcctcggcacctgggtggcttgctgcccacaggtgtggtggcgggcacctgtaatcccagctactcaggaggctgaggcaggagaattgcttgaacccgggaggtggaggttgcaatgagccgggatcgcgccactgcactccagtctgggtgacagagcgagactccatctcaaaaaaaaaaaaaaaaaagaaatatactaaaaggccgggtgtggtggctcacgcctgtaatcccagcattttgggaggccaagacagctggattacttgaggtcaggagttcaagtgcagcctggccaacatggtgaaaccccatctctactaaaaatataaaaattatccaggcatgttggtgtgcatctgtaatcccagctacttgggagactgaggcaggacaatcgcttgaacccaggaggcgcagcttgcagtgagccgagatcgccctactgcactccagcctggggcgacagagcaagactccgtctcaaaaaaaaaaaaaatgaaatgtactaagagtgtaaatcttacttgttcttaccatcagattttttaaaaaggtaactggtaacagatgtgttaattaacttcatggcagtcatttcccagtgtatatgtgtatcaaatcatcacctacaccttaaatgtatacaacttttatttgtcaaagacaaaaaaacctacgacacaggaagtgattacagacagaggggaagaggtctgaggactgagtcttaaatagatattggcagactgcaggatcttgtgtgagtgtcctatgaactgagttcagttccgcagtgctgtgagttttaccccatcctcatgtacacatatgtggtttgttttaggacacagtggtctttgaagacgtggttgtggatttcacgctggaggagtgggccttgctgaatcctgctcagagaaaactctacagagatgtcatgctggagaccttcaagcacctggcctcagtaggtgaggatagcattatttctgcacttagttattagataataaatgttttgtctggttgcagtggttcatgcctgtattcccagtgctttaggaggctaaggcaggaggatcacttgaggctaggagttgacaaccagcctgggcaacatagtgagaccttgtctctacaaaaaaaaaatcaaaaattagcccggtgtggtagcatgctcctgtagtcctagctacttgagaggctgaggcaggagaatcgcttgagaccaggagttcaaggctacagtgacccatgatcacaccactgtactccagccagggtgacaacttgagaccctgtctcaaataaaaaagaaaaaagagccaggcacggtggctcacgcctgtcatctcagcactttgggaggccaaggcgggtggattgcctgagctcaggagttcgagaccagcctgggcaacacggtgaaatgccatctctactaaaatacaaaaaattagctgggcatggtggtgcgtgcctgtaatcccagctactcgggaggctgaggcaggagaattgcttgaacccgggaggcagaggttgcagtgagccaagatcatgccactgcactctagcctgggccatagagtgagactccgtctcaaaaaataaataaataaataaataaatatttcttgctcattaagcctattctaagatttagaatgcagaaggggaatacattggttaataagacagttataatcattgatgtcctggacctaaaattcagtagcttctctgtgataataaaaatctacctatcaatctgtacttttctttctgccttgttgaaaagacttaggatcagccaggcgcggtggctcatgcctgtaataccagcactttgggaggccgaggcgggcggatcacgaggtcaggagtttgataccatcctggctaacatagtgaaaccctgtctctactaaaaatacaaaaaattagccaggtgtggcggagggcacctttagtcccagctacttgggaggctgaggcagcagaatcccttgaactcgggaggcagtggctgcagtgagtcgagattgtatcactgcactccagcctgggtgacagagtaagactctgtctcaaaaaaaaaaaaaaaaaagaaagaaagaaagaaagaaaaagaaaagacttagggtccttttgtgttaccagcgcaggtatatactggcggcacagagaggttaattgtttgaaaccttgtgatgatttttctgtgtatttaaaattgtctaccattttgactgcttgtacttttttttttttttttttgcttctcattagttgaaatccttgagagggacagcatcacagggactctgtgtccagtggtcttagcaggaagattgcttcagaatttggcatgaatcatgccactgtttctgtgggcctgaatgcccttccctcagatgattctggtttggtttggtttgccaccaggagttactgtgttgttgtttgctttgtatacataagcatgtctcttacccaaatagaattcagtttcatcttgaacataaacaccttcaattattactattattattattttgagacagaatcctgctctgtcgcccaggctggagtgcagtggcacgatctcggctcactgcaagctctgtgtctcaggttcacgccattctcctgcctcagcctcccgagtagctgggactacaggcgcccgccaccacgcccggctaattttttgtatttttagtagagacagggtttcaccatgttagccaggatggtctccatcccctgacctcgtgatccgcccgcctcggcctcccaaagtgccaggattacaggcgtgagccactgcgcccggccaaacaccttcaattttaagaagaactgtgtgctccctttggttctggagaccctgcttataggcagccaaaatggccttggaccaccaccttccagacacattttcttttgggagtcgtgttccctgcaggcctccacaggctccaagatggcagaaggagagctcttgtacttcttcataatgaagtcaggccgggcacagtggctcacacctgtaatcccagcactttgggaggccaaggcaggcgaatcacaaggtcaggagatcaagaccagcctggccaatatggtgaaaccccgtctctactaaaaataaaaaaaattagctgggcatggtggcacgcacctgtaatcccagctacttgggaggctgagacaggagaatcgcttgaacccgggaggcagagtttgcagtgagccgagatcgcgccgctgcactccagcctgggcgacagagtgagactccgtctcaaaaataaataaataaatagataaataaaataaaatcacataatgaagtcatgaaacaattaaacacctgaattacttctttctttgcagatgccttcctcatcatattggttcacttttttgtttcagataatgaggctcagcttaaagccagtgggtctatttctcagcaggatacttctggagaaaaattatccctcaaacagaaaatagaaaagttcacaagaaagaatatatgggcctcccttttaggaaaaaattgggaagaacatagcgttaaagacaagcacaacaccaaggagagacatttgaggtgagttgtacttagaagaaaaaggcagtatcgccaggcacggtggctcatgcctgtaatcccagcacttcgggaggccaagggaggcggatcacctggggtgaggagtttgtgaccagcctgacccatatggtgaaaccttgtctctactaaaaatacaaaaatgggcgcggtggctcacacctgtaatcccagcactttgggaggccgagggaggcggatcacctggggtgaggagtttgtgaccagcctgaccgacatggtgaaaccctgtctctactaaaaatacaaaaataggcgtggtggcatgtggctgtaatcctagctgctcaggaggctgagacaggagaattgcttgaacccaggaggcggaggttgcagcaagccaagatcgtgccactgcactccagcctgggctgggcaacagagtgagactctatctcaaaaaaaaaaaatgataattctgttagaaacaattatcagagagccccacatattactattgtttttgtaatggactgtggttgaactatctaccagagtatttcgtttattctagtttgaaataatttcaacagtacaggaaacttacccttgtatagaaaatggcaaaaatgttatcctaatattcattaatatatattaagaaataattggccggtgcagtggcttatgcctgtaatcccagcactttgagaggccaaggtaggtgggtcacctgtggtgaggagtttgtgaccagcctgaccaatatggtgaaaccctgtctctaccaaaaatacaaaaattagctgggcgtggtgccatgtgactgtaatcccagctgctcaggaggctgagacagaattgtttgaacctgggaggcagaggttgcagtgagccaagatcatgccactgcactccagcctggggaacaagagcaaaactccatctcaaggaaaaaaaaaaagaaattattaaggcataaaccattaataatgtgctacccatttttagcagaaatccaagggtggagagaccatgtaaaagcagtaaaggtaataaacgtggaagaaccttcagaaagactcgaaattgtaatcgtcatctgcgcaagaattgttgtactagtgtaagacggtacgaatgcagtcagtgtggaaaactcttcacccattcctcatccctgataaggcacaaaagagctcactctggacaaaaattatataaatgtaaggaatgtgggaaagccttcagtcgcccttcctacctacagacgcatgagaaaactcacagtggagagaaaccctatgcctgtcaatcttgcgggaagacatttcttcgttcccactctctcactgaacatgtaaggactcacactggagagaaaccctacgaatgtgggcagtgtgggaaaggcttcagttgtcccaaatcctttcgcgcacatgtgatgatgcacgccggagggagaccgtatgagtgcaagcactgtgggaaagccttcaggtgtcagaaatcctttcgagtccatatgatcatgcacgccggagggagaccgtatgagtgcaagcagtgtgggaaagcctactgctgggcaacatcctttcaacgacacgtgagaattcacaacggggagaaaccctataagtgtggaaaatgcgggaaagcattcggttggccctcatccttacacaaacacgcgagaacgcatgctaaaaagaaacctgtgagtgggggcagcgtgggaaagtcttccgcgaggcctcgcccctccacagatgtcaaatcacaaactagagagaaagtctataaatgtgaaacgtgtgggaaaacgtatggttggtcctcatctttacacaaacatgagagaaagcacactggggagaaacctgtaaatgcagccagtgtgggaaaaccttcaggcgggctttgctcttccaaaaatgtaagaacgcagattggacagaagcccagtaaatgcgaaaaatgtgggaaagctttcagttgtcccaaagcctttcaaggtcatgtgagaagtcacacaggaaagaaatcctgtacatctaagtaatgggggaaaacctgtgcaaattaattcacatacatggttcagaaaattcacagcaggagggccgggcgcagtggctcacgcctgtaatcccagcactttgggaggccgaggcaggcggatcacgaggtcaggagatcaagaccatcctggctatggtgaaaccccgtctctactaaaaaaaaaaaaaatacaaaaaattagccgggcgtggtggcgggcacctgtagtcccagctgctcaggaggctgaggcaggagaacggcgtgaacccgggaggcggagcttgcagtgagccgagatggcaccactgcactccagcctgggtgacagagcgagactccatctccaaaaaaagaaaattcatggcaggagaagaatctcatgacgtttataaatatggtattgcctttatcaggaccacatcctaaaagtgggcctctagcaaatgaatttgcagttctcttgcaggtaaagttgaggggagaatcctgtaagtcctctctcacctatagtactgaaattttgatacataatggttttttcttataaattactaatgtttctcttttcatttagaagtgtattgcacccatgggtgatctgatgtattttaatatgcattaactttaatttttatatattttttttgttactccgtgtgaggccattagaccaatgaaatatgggtgtttgttgacattttctgactggccctgtgtgttccaagctggatattactaccatgttacttttattccacctttccattttacagggaaaaactatttttaatgttaatactttctacttatacaggcaagtaattcagtggctttatgctattggtcagagaatccttcttcattttgcttgtggactaataggtagttggtagaaatacgtatgcatgcaaattcttggaggagtgtagtctcgtgggaactatttttttcatctgttgctgtttgctctttgacctggcttctgggttggaattggaaaataggtttttttgggttttttttctttttcttttttgagacagagtcctgttatgttgcccaagctggagtgcaacggcacgatctcggctcactgcaacttccgcctcccggtttcaagcgattctcctgcctcagcctcccaagtagctgggactataggcatgcaccaccatgtccagctaatttttgtatttttagtagagacggggtttcaccatgttggccagggtggtctcaaactcctgaaatctgcccgccttggcctcccaaagtgctgggattacaggtgtgagccactatgcctggccatattatcattatcttaatacctcattgtctcagtatttcttgtgcttctgtgttcctgcttccatgacagatacaatggtacaaccataaaaacacaggggattgcggctgggcgcggtgactcacgcctgtaatcccagcactttgggaggctgaggtgggcggatcacgaggtcaggaaatcgagaccatcctggctatcatggtgaaaccccgtctctactaaaaatacaaaaaattagccaggtgtggtggcgggcgcctgtagtcccagctactcgggaggctgaggcaggaggatggcgtgaacctgggaggcgaagcttgcagtgagctggaatcgtgccactgtactccagcctgggcgaaagagcgagactctgtctcaaaaataaataaataaagaataattttttaaaaaagcacaggggattgtttccctactgcatctactgtgacctagtattcttcgtgagataaatcttacctttcatgagaaaatgaaagacaatactggcttatcaggtaaactctggaaatttcctgtcacatagagctgaatacaatctctcagtatgtgttcagttattatgtttgattatgtattattaaaacaaaagtttctgtttctgagaaatatctatttactgtgtttgtgtttttaaagaagttggattctatacaaatggataaaatgtttcttagaaatagcctatttaactgagtttttcaaataagttgtatactaacaaatgtcaatctctgttttttatttactgggagaatgtattaaaatattgaaaattgccaaatcaacatggtgactttaaaaatgatacttctgggccaggcacagtggctcacgcctgtaatcccagcactttggggaggccaaggcgggcagatcatgaggtcaagagatcgagaccatcctggctaacacggtgaaaccccatctctactaaaaatacaaaatattagtggggtgtgctggtaggtgcctgtagtcccagctactcgggaggctgaggaaggagaatggcttgaacctgggaggcggagcttgccaagattgcgacactgcactccagcctgggtgacagagcgagactccgtctcaaaaaaaagaattatacttctgaattaatattaccagatgcattcagatttagacattttctttctagtacatttgtttcctatactgttataattttgtctaagaaattcttttttttttttttgagacagattctcgctctgttacccaggctggagtgcagtgccgtgatcttggctcactgcaacccccccgccaaggttcaagtgattctcctacctcagcctcctgaagagctgggattacaggcacccgccaccacacccggctaatttttgtatttttagtagagacggggtttcactatgctggccaggctggtctcgatctcctgaccttgtgatctgcccacctcggcctcccaaagtgctggggttacaggcgtgagccaccgcgcccagcctaataaattcttgtttattcataatgacaaaaacttacgtaacggttttataaatttaagtattaaataagtctagcaaaagacataaaaagataactaataaaacaagtttaaactttattggagcccagtagcaatggctcacgcctgtaatcccaggacccaccgaggcgggtggatcacctgatgtgaggagttcgagaccacgctggccaacatggtgaacatggtgaaaccttgtctctactaaaaatacaaaaaattggccaggcgtggtggcaggcgcctgtaatcccagctacttgggaggctgaggcaggagaatcgcttgaacccgggaggcagaggttgcagtgagccaagattgcgccactgcactccagcctgggcgacaagagtaagactccatctcaaaaaaaaaaaaattttttttttggataatatcaaggcagaataaagtatagtatcaaacttgacaaggtagataatagggaatgcagaataaaggatcgggcttcagtaagtgacaatctcatcatgaattcatttatagttccaccatgtaatatgtcttaaatactatttctttttttttaatactatttcaagaactgctcatgagttaggaaatagtgagcagtaatacagaaataacggcaggaccaggggcagtggctcacacttgtaattccaaagcttcgggaggctgaggcaggaggatcacttgagcacaggagttcaaggccagtctgggcacatagtgagacacagtctctataaaaagaaatttttaaaagtatctaggcatggtgatgtgcacttgtagagccagctactcaggaggctgagggtggaggatggcttgagaccaagaggtccaggctgcaatgagttatcttgccactgtactccagccagggtgacagaatgagaccgtgtgtcaaattaaaaagaaaaaaagaaacaataattatttccctggccgggcgcggtggctcacgcctgtaatcccagcactttgggaggctgaggcgggtggatcacgaggtcaggagatcaagaccatcctggctaacccggtgaaaccctgtctctagtaaaaaatacaaaaaattagctgggcgtggtggcaggtgcctgtagtcccagctactcgggaggctgaggcaggagaatggcgtgaacccaggaggcggaacttgcagtgagcagagatcgaaccactacactccagcctgggcgactgagtgggactctgtctcaaaaaaaaaaagagacaaaaggtatatttatggttcagcctcatttctgcaaatattaaaaattttagggcatgatgtatacattttatatatatatatatatagtgtgtgtgtgtgtgtgtgtgtgtgtgtgtgtgtgaatgtgtgtgacggagttttgctctgttgccaggctggagtgcagtggtgcgatctcagctcactgcaacctccacctcccaggttcaagcgattctcctgcctcaccctcccaagtggctgggaatacaggcgtgccccgccacgcccagctaattttttgtatttttagtacaggtggggtttcaccttgttggccaggatggtctcgatctcttcacctcgtgatctgcccgccttggcctcccgcagagctgggattacaggcgtgagccaccgcaccaggcccatgtcatatgtttttatgagtttggacattggcatctgggaccaggtacttcatctggatttgaaccacaatgtgggtgtttgtttttaatacctttgtgaaataattttaaattgccttatatatttggcattgtcactttgctgcccctacacactgatggaaaaattgtgttctgcagaaaactagagttcctcacagggtgaggaagagttatggtcatctgcacagttgtagcccgttgcgagtgttttcccatgtgcacagtgatatctaggcaagtgtgccatgatttcctggtgaggataaaatctatggacggtgagagaactagtcaaggaataactgaagtgagctgcagacaggattatcattttgagtaacatcccaatgtatttgtcatcctttaattaatttttatttttttaattaaaaaataatttttaagtgtaaacctttaatgatccacaaagcccaaaatgtccatttgattttcataggtatcgtttccatatgcttagacttccagcagctattagaagagaaaaatatgtaacagctttgtgtttaattaaaggcaaatgaaatccagtctgtgtccattttcaatgttaatagtcttgatagcgggccgggcgcagtggctcacgcctgtaatcccagcactttgggaggctgaggtgggcagatcaccggaggtcgggagttcgagaccagcctgaccaacatggagaaacgctgtctctactaaaaatacaaaaattagctgggcatggtggtgcgtgcctgtaatcccagctacttgggaggttgaggcaggagaattgcttgaacccgggaggcggaggttgcagcgagccgagatggcgtcactgcactccagcctgggcaacaaaagcgaaactccacctcaaaaaaaaaatagtcttgatagcactgcaaagacttcgtgtcatttcacaatcacagttagcttatttgatcactccttccctacattcctctcattgtacaaattggtaccagatggaaagtgctgactgtgagatgtccaggttcttgacgcattgaacaaagaattgaacaaaacacacaaagcaatgacagcgcagatttatttaaatgaaagtacactccacggagcgggagccggccctagcgggcagctcaagagccctgattgcaatgttctttagggtttttataaggctacaagaattttgtaacacccctaggtgccctttagagaactccaattggttaccccctatgaaggattcgcctgcaaccaatcagaggctgaagtgaagacttggccatggccaatcagaggctgaggtggagacttggccctgtcaaatcagagtctgaagtggagacttctatcttgttatcacagcagtgaggatgtggcctgtttctgcctaatcttgcctagaagtggctgcacctgctgttcctttgcttatgccttaactggttatcctaattccctattctcctgcctcaaaatgacaagttaatcacaagcagcagactcatggttaaccttacatatcccaaaatagtaatggaatgtctccatagtgaaagcctgatgtgtcttaccacctgtattgggcactgttcgaatttttatatttcaagacaagtcatcttcttctggataaaaaataaaattacacagtttgccaagtatggcattaggtgttttgttgttgttgttgtttgtttgttttgagatggagttttgctcttgttgcccaggctggggtgcaatggcgtgatctcagctcactgcaacctccaactcccaggttcaagtgattctcctgcctcagcctcccaagtagctggggttacaggcgcatgccaccacacccagctaattttgtatttttagtacagacagggtttcaccatgtaggccaggctggtctcgaactcctgacctcaggtgatccacccacctcggcctccgaaaatgttgggattacaggcgtgagccaccgtgcccggccagcgttagtttttaaccagagtattcaaaagcatccatttatatgacattctggatagagcaagagtataggaatttagaaccagatgaggcattaagggtcacaggacagtttgtctccaaaagggcagaaggaggcttttaggggtgacagagtgttttgtatcttgattatggtggtacaagtatgcatttgtgaaaacccagctccatttaaattgtaaagtttactaattttaaataacggaaaacaaaataagcaaagtctcattgatgaactaagaaaaaattaaaactcatccaatctttgatgtttagtttgcaacaatagtagtttccacttctcaaagactcgtgacccatcaagacttttttggaacccattataaagttaggaagcacttgccagggtcatagctgccctcaccgcagccacttaacctgagggaagccacagggcaccagcaatgcccctctaagttcacaccaagttcctggggtcagaactctgagaatgctgtggtttggaacctaaaaggaattctacagagttccaaaggggatccttgggtggagggaaggagtgtcttatccttgggcatttgaatcacgtcttccaaggttctatcctgaggccatttgcagctcagttctagctccctgacatatcagggtcaaacccagttttgtttttgttttgagacggagttttgctcttgttgcccaggctggagtgaaatggcgcgatctcagctcactgcaacctccgcctcccggattcaagcgattctcctgcctcagcctcccgggtagctgggattacaggcatgcacgaccctgcccggctaattctgtatttttagtagagactgggtttctccatgttggtcaggctggtctcgaactcctgacctcaggtgattcgcccgcctgggcctgcaagttgaacctgcatatctttggagatctggaacacacgctaagttcagaaccagaaccggaagtgctgaggagctttccttctagtcccgcccctcacgctgtcgcttacgcttccagttagcaacttggtcgtggaaaacacctgcctgtggccaagagacgtgaagttagagcttcagaagcgtccaggccgggcacagtggctcacgcctgtaatcccaccactttgggaggacaaggcgggcggatcacttgaggtcaggacttagaggccagcctggccaacatggcgaattcctgtctctgctaaaagtacaaaaattagccgggcgtggtgacgcatgcctgtagtcccatgtactcgggaggctaatgcaggagaatcgcttgaacccgggaggcggagcttgcagtgagccgagatcgcgccactgcactccagcctgggcgacagagcaagactccatctcaaaaaaaaaaaaaaaatatatatatatatatatatatatgaataaagtaatctcacatttgaatgaagaatcatgaatcctaatgggacaatagggtgcccaactgttcatatatttataaaggagtgggacttattccaggaacttaaatgtttccatattggaaaatccaaatacgttcatataattcaccaaggagatgagaaatatcctcagggaggtaagggtgtatttgtacataagtaaatttctatttctgtttagaaatacttgtttagatcgcttctcggccttttgggtaagatcaagcgtaaaaatacttgtttaggaaaataattccttaaagtgattaaaaatacaactatctcaaaattagagccaaattcaaagacttcatacattagtagggtcacctggtgtggatggaaggacatgtcacataatgccagtgttctgactttctatggctgcataatgccgcccccaaaattatttatttattttttattttttgagacggaggtttgctcttattgtccaggctggagtgcaatggtgcgatctcggctcaccgcaacctctgcctcccgggttcaagcgattctcccgcctcagcctcccgagtagctgggattagagatatgtgccaccacgcctggctaattttgtatttttaggagagacgcggtttctccaggttggtcaggctggtctcaaactcctgacctcaggtgatccgcccttctcggtctcccaaagtgctgggattacaggtgtgagccaccgcgcctgcccccgcccccctaaaatttagatcacaacaaccacatttattttgctgaggaacctgatatttatccaggactgggcagaggcagctcatctttgccattctccagttccacacgggcacaaattggggtggttttttcgcattcgtttttatagggcctttcacgatgtctttttatctcgggaaccatggggaactttacggcaagtaacaatgttcacacataaaacaggacggtgtcatttttctctttttgtgcacacaagtgtcaatttttactgcaccatcagtaagtctagatttaatccaatatgaaagaaagtcaaacccatcacaaaagagcaaggttattctggcttgagctctaaaatgcacaagtcattgtcctctgcagtcttgtaaatagcctgacatcagttgttttaaggttttaagtagtctgcgttttcattagttatcactagatggtagcagagagcatcggtcagaattaataaaagagggttaaaccagctcaagcaagcgaagccaatggctgtagtatttaggaagctgctcagaccaaggctatggctgaagcagcccacccattctacacacacgtggggcccaggaacctttgtaaagtcctctactgttggaccttgtgtcttgccaagtggctgtcagtgtaggctggcatttagtgctgcgtggccttattgatggttacaaccattttttctgctttggtaccacccgccatctaccggaactcttcagtacatctccacgtggatctgagctgagcttctcccgctttctctgagagcatttccagccaatatgtgtctgcttggtcatgtccttgcctctgccccttagccaggaactttacacaaacataaaatgtatctatacctctacatcatgccataaatgaaaattgtttccagatttatcaccgaagataaatgtgaaaacataagagatcatgaattggaataagcaaacatttctgaaaacacaaaaacaccataaaatagaatgaacagatattagaagctacaaaacaaaaggcaccatagcagagtgaaaagagagtttatagaatggaagaagaaacgtgcgatacacagatctggcaaagggcttgcatacagagtctaaacgctcctataaattactaagaaggcaggcagcacaatagagaagtaaaattacagatttgattaatcattcacaaaggaagcttgtccaagtggctaatatttaaatgataattcagttttttcttaagggaaatgcaaattagagcgaaaatgacatactactactccctaccatactgactgaaagcccaaaacatccaggaaaatgctattgctgaatatgtgcaacagaaatgctaagttgtggctggcacagtggctcacgcctgtagtcccagcattttgggaggctgaggcgggaggatcgcttgcgcccaggagttcaagaccagcctgggcaacacagtgagaccaccccccccatctctaaaaagaaaaaataaataaaaattaaaaaaatgctaagttgctacaacgtctttggaaaactgtgccttttgcatggctcggtatgtttagatacacaaatccttattgtggtggagccccttccttccgagctttccggaaaaccaacgacacaactccccaaacaggaagcacaacccgcttgcacctgtgcaccatgctcggttggagctcccagctgcctccagggcacagcggctttggaggaggggccgcgttgcatgctgggagcaatctgaggggcgggaccctagcgtttaagggctgtccttttttgaaccacatttccaaagcgctcgggttccccgagtggtgccccaagcagtggacgagcaaggtgcccgagaaggaggggaccacagacaccgcctggtgtccacggactaccaggaagccagggggcggtggcctccgtggggaatgcgcatgtgcggtcccgagcctcaggctagcgttcgggactagagtggggcgtcgccgccgcatgttgcacctgtcggcagcgcggcctctcccggatgtgacgtagcgtgacgcctgcaggattgatgctgaaatgacgaggtggcagcgccggttcctgtagctgaggggtgtgagttcgaggtctgattgtcctcgttttctacttccggtcacctcactgccacatggcaggcctccaggggaatacgcttaagatgagacacctgcgcatctctctttttttttttttttttttttgagacggagtctcgctctgtcacccaggctggagtgcggtggcgcaatctcggctcactgcaagctccgcctcctgggttcacgccattctcctgcctcagcctcccgagtagctgggaccacaggcgcccgccaccacgccccgctaattttttgtatttttagtagagacggggtttcatcgtgttaaccaggatggtctccatctcctgaccttgtgatctgcctgcctcggcctcccaaagtgctggggttacaggcatgagccaccgcgcctggcctctttttttttttttcttttgagacagagtttcgctctgtcacccaggctggagtgccgtggcctcatcttggctccctgcaacttccacctctcaggttcaagccattctcctgcctcagcctcccgagcagctgggactacagacgcgcaccaccacgcccagctaatttttgtatttttagtagagacggggtttcaccatgttggccaggctggtctcgaactcctgacctcaggtgatccacccaccgcggcctgccaaagtgctgggattacaggcgcgagccagcacacccggtcacacctttgcatctctaggcaagattcgtagtcagaagacacaaaaccagacttggaattcctgatttagggttgaaatggcctcaagcctgggaatacgtgcagatacctaaggactggaattccgcccaggatgaccctcaaagggaagttcacgtttcagacctacggtgtgtgcagagctcaggccccaggaacttggggacagaggtgccttctcgcttctctctgaatctgtgtctgaggtgagagaggcatggccctggtggcctttcttaatttcaggttgggttccaagaaagcaatgacggctcgcgatttcttctttctcacgccattctctgttcggttgccaaggaagtggaaaaaaattggttttgcttatctaaaaaggttcaggtgagtttatttttattatttatttatatgtatttattttttgagatggagcctcgctctgtcgcccaggctggagtgcaatggtgcaacctctctgcaacctccgcctcgcgggttcaagcgattctcctgcttcagcctcctgagtagctgggattacaggcattcgcaaccacgcccagttaatttttgcatttttagtagagacgggtttcaccgtgttgaccaggctggtcttgaactcctgacctcatgtgatccacctgtctccgcctcccaaagtgctgggatgacaggcgtgagccaccatacctggccgacttgctgtttaattcagcaaaaaggtgttgtatttctgctttgctgtgacatgtatcggaaaattgagcatatggaaataatgagtgtgaagagcagcatgtgctcctgtttgggcattatgcctcattagaaaaaaatctggcctttccggaggttgcagtgagccgagattgtgccactgcactccagcctgggtgacagggtgagactcagtctcaaaaacaaaacaaaacaaaaactaccatctcctataaaagggcattaaaattttccaaaatttgggattttgaacaccgtcccaatttagtatcaaagtatttttgagaatgccaaatatcctttgatactaaattgggacgctgttcaaaatgacacagtgtctgcagctcaccttcattattcctagactctcccttaccatccacagctcttcttgcatctaccggatcaccaagaacttgcacagctatcattctgcttgtaggaaagggcacatgctggattaaaaccgtgcagatgaccacatccttttacaaaccaggggcaactctgtggcttcctaggctacagattctctcagactacactagcagcaaattgagaaggccacctctttaatacaatttacaattcattcaaaaggactctataaacagccacacttgatggcccgaataactggtgagactctggtgaccttttcacttcataggtacatatcatattacctaaagcttttgagcattgcaaaaataaagatggaccggccaggcatggtggctcacgcctgtaatcccagcactttgggaggccgtggcaggcagatcacgaggtcaggagatcgagaccatcctagctaacacggtgaaaccccatctctattaaaaatacaaaaaattagccgggtgtggtggcgggcacctgtaatcccagctactcaagaggctgagccaggagaatcacttgaacctgggaggcggaggttgcagtgagccacgattgcgccattgtactccagtctgggcaacagagcaagacttcatctcaaaaaatcaatcaataaataaagatggaccatgagagttttattttgtaggaaattattactctgttaactccatgaatgcaggactgggtatcactccacactatttacaaacaccctgagcagtccctgtgatagtgtttacttaacacatactgagtgatggaaatataaattaataaatacatcctcattctccaatgccccaccatccatagaaaaaatgcaaaatacgtccctctgttttcccgattatctcccttgtggattattttcttccaagacccatttttttttttttttcggacgaaatcttggtctgtcgccaggctggagtgcagtggcaggatctcggctgacggcaacctccacttcccgggttcaagtgattctcctgcctcagcctccccagtagctgggattacaggtgcctgccaccaggcccggctaatttttgtatttttagtagagacggggtttcaccatgttggccaggctgatctcgatctcttgacctcatgaaccgcccacctcagtcccccaaagtgctgggattacaggcgtgagccaccgcgcctggtccccaagacccgtattttttatatcaagtctctacttgttacattaaaatctttactttttaaaaaaaatctcttttcccagaaaaatacacgccctcgaactgcgaggacttattctatattgagagcctgctgtgtcttgattacttttcagcctaattttttgttttgagcttacaatgcctggtatataagagaggctcaaaaagtaggatcaggttaaaatcatggtctttgggctagaaggaatttttcttttcttttcttttctttttctttttcttttttcttttcttttttttttttttttgagacagagtctttctctgttgcccaggctggagtgcagtagcacaaactcggctcactcccgggctcaagtgactttcctgcctcagcctcccaagtagctggaactacaggcacatgccactgcacatggctaatttttgtattttttatagagatggggtttctccatgttacccaggctggacttgagctgctgagctcaagtgatccgcccacctcagcctcccaaagtgctgggattacaggcgtgagctactatacccagcctacgaagacttgttctgaatcctgatcctaccttataacttgctagctttgtaatctgtaagtctgttacccacaaaaggagacaataaatgtatctacattatagttttggaagattaagtgaatttatatatgttcattgaattataggaaacaaaaccataccagatatatggtaagcaatattcaactctttacatggaaggaaaaatcagcccttgagaactgggacctggcctggcattcgtcccacgccacatgattctgttgaacagcaatgattttacaccaccccgacatcagatggggccacggggtgagaatgagcaaagcaaaaacaagagtgcagggaagttctccaggtggcctgagactgacccaatcttccccactcttgactgtagctctcaagaataactagaatgtactgggaatgcagccgggcacggcggctgatgcctgtaatcccagcactttgggaggccaaggtgggcggatcacctgaggtcaggagttcgagaccagcctggccaacatagtgaaaccacgtctctactgaaaatacagaattggccgggcgtggtggctcacgcctgtactcccagcactttgggaggccgaggcgggcggatcacgaggtcaggagatcgagaccatcctggctaacacagtgaaaccccgtctctactaaaaatacaaaaaattagccgggcatggtggcgggcgcctgtagtcccagctactcaggaggctgaggcaggaaaatggcatgaacctgggaggcggagcttgcagtgagccgagattgcgccactgcactccagcctgggcgacagagccagactccatctcaaaaaaaaaaaaaaaaagaaagaatgtactgggaatgcaacattccgagataagcggggagctggctagaacactcaggttctgctctagtccccgcaagaacaggatgttctgctttagcccagcatgttctcttgcccctgaggtatatcacctggggcaggctgccttttggggtccctaatatggagtgcaagtgaggctccatctgctccatttgagactccatctgctccaggcagctgtctgagccttggaggagcagctcacaatgaattgtaggcttctgttgtcccttgctgcctatctgtaagtaataaacccatgaaattccatgtaactcaacgagttccatgtaacttgttgtatgtgggtgttctctctcaccagagtcagataagttgctaaccagtgcacactgaacctgcttcacaaagagtactgtgtaatcatgtcattacacggaataaaaaattatgcaaacaggccaggcgctgtggctcacgcctgtaatcccagcactttgggaggccgaagcaggtggatcacgaggtcaggagttcgagaccagcctgaccaacatggtgaaaccccgtctctactaaaaatacaaaaattagctgggcgtggtggcagccgcctgtaatcccagctactcgggaggctgaggcaggagaatcacttgaacccgggaggcggaggttgcagtgagctgagatcaggccattgcactccagcctgggcgacagagtgagactctgtctcaaaaaaaaaaaaaaaaaagaagaaagaataccaaatttttttttttttttgagatggagtctcactctgtcacccaggctggagtgcagtggtgcgatctcagctcactgcaacctccgcctcccgggttcaagcgattctcctgcctcagcctcccgagtagataggattacaggcgcgcaccaccacacccagctaattttggtatttttagtagagacggggtttcaccgtgttggccatgctggtctcgaactcctgacctcgtgatgtgcccacctcggcctcccaaagtgctgggattacaggcgtgagccaccacacctggcgctcccagccttctaacatgcaacttctgagatttccattcctcatgctgtgtggtcacctcattgtgaaataagtcaacagaccctactttgttcaactgcagttgtgtttctcatgggtttgggctggtgagcattgacataattaatgtgtgagcttttcttcttctgaataagtcattttaatgagaaaaatgtttaacattataagagtttaaaaattcacataaaaattctggaacatgcactatagcatcagaacatatttaaaaatatacagttatacacatgatttgacaatccataattgtactggaatattttaacatatcccttctcaatacatgaaagatagttaaaattttaagtttacagcaaatataaaaacagttctaggattgttctaagaaatacctacagaaccttgtgtttggcaaaaaagtagattatttttgcaaacataaaaattatgataacacaagtttatcatttagaaactgcattcagctctgaatgacagaagactcctataatctgtttcgtatatctacaaagtgcatacttctcatatgtattgtccagaaacaaaaagtacagggtaaatgcaaccacccaacactacaatcaggaaacaatttcctgatgccataattgtaactttcagggtacagtcaagaacatgaggacaggccgggcacgggggctcgcgcctgtaatcccagcacttggggaggctgaggcgggtggattacctgagatcgggagtttgagaccagccagaccaacatggagaaaccccgtctatactaaaaatacaaaattagccgggcatggtggcgggtgcctgtagtcccagctactcggaaggctgaggcaggagagtggcgtgaacccgggaagcggagcttgcggtgagcagagatcacgccactgcactccagcctgggctagggagtgagactctgcctccaaaaaaaaaaaaaaaagtaccgacgttgacatgggaaatcttgtacaacacatgatgtactctagattttatcatcttcaaataacaaggtctaccttcttacttcataacttttgtgtccaattcccagccaggagctgggagacacagaaaagggtaaaagagaaaaatgagtcagatgagggtgtccctaggccacagccttgtattttgcaatttctgccaggatcatgaaatactgtgtccactgagtaaaaaaaatgctgaatatacattttctaatactaaagactaaaaccctcaaaaaacatggtgaaaccccgtctctactaaaaatacaaaaaaaattagctgggcatggtggtgggcacctgtagtcccagctattcgggaggctgaggcaggagaatggtgtgaacccgggaggcggagcttgcagtgagccgagatcgcgccactgcactccagcatgggagacagagggagactccgtctcaaaaaaaaaaaacaaaaaaacaaaaaaaacgaaaataaataacctttaagttcaaactttcagcctgcagaactatgagagaataaatatgtttcattcggccaccaactttgtggtgatttgttacagcaccccttgcaaacacttaaaggagtatttaccagctgtttctctcaaaaagaatgagaaataatgggctagaggtctactttaacataaggcactaataaacccatggctcgacttaagacctttataaacattttctaacggtattgaatttattcagtacagtaagtcatccgcacggaacctttgccacattacttactaacatagggtttccctccagtgtgagttttcatgtgttattttaaggatgggagaccacagaaagcttttccatgctgcatacatttagagagtttctctccaatgtgaatccttatgtctttgtaaggacgagagtctaccgaaggcttttgtacactccttacattcgtagggtttctctctactgtgagttctcaaatgtcctcgaaaagatgatgaccaactgaagactttcccacgctgctcacacacatagggtttctctccaatgtgaattctcacttgtgttcggaagtatgagggactactgaagactttcccacattccctacaggtgtacagtttctctccagtgtgagtccttatgtgtcccttaaaggaggagggagaactgaaggattttccacactgtttgcatccacagcgcttttccccagagtgtgttctcatgtgaaccctaaggtccgagggccaactgtaggtgttcccacattccacacacctgtaggctttttctcccgtgtgcattctggcatgtatgatcaggtagaaggaacgaaagaaggccttcccacattctttgcatttgtaggctttctctggactgtgaacattttttttttttttttgagacggagtctcgctctgtcgcccaggctggagtgcagtggcactatctcagctcactgcaagctccgcctcccgtgttcacaccattctcctgcctcagcctcctgagtagctgggattacaggcacacacaaccatgcctggctaattttgtatttttagtagagacagggtttctccatgttggtcaggctggtcttgaactcccaacctcagatgatccacctgcctcggcctcccaaagtgctgggattacaggcatgagccaccgcgcccggcttgtattttttttatagagatgggctctccctatgttgcccaggctgatctcgaactcctggactgaaacgatcctcctgccttggcctcccaaagtgctgggaatacaagtgtgagcaaccacatctggcccaacttgcataaaaccttctaagtaggcggccacatttttttcaattactttccattgctaaaatttctctggtcaatttcagacacaatgactgacaggccagcctgctactcatagaaggtctggctacagaacatgagaagaacaggtaggtgccagcaggcttccaagtgaaaggaacacccattttcacttcaattatttatccctgcttgaatgtaacatcgtcaaaaatcaccatgatagataaaaagaatgtaacggtagaagtaaatcttgtcattggaagtgataatattgcttttctgagaaactaaacataactgcaaaactgccagaacttgataaaatacgtgcaatatacataattaaatgtattgatggactaaaatttcattttctggaaaaagtatataaaatattgaggaagaggctaaacaccacctgccgggtctgtgtgaggacaatttcaggtatctcatgagaaggtgacagagaggtcgcccatgggtatataaacaactttgtgagggcgaagactcctcaattcaaatgcatttgcattctgtaagcatattgagttcagtgggccaggcacggtggttcatgcctgtcatcccagcattttggggtcctggcgggaggccatgagttcaaaatcaacctgggcaacataggtagagcctgtctacaaaaaataaaaagagttaactggtccacgggttctggtttacagtgagctggtttttttgttttttgttttttggtttttttttttgagatggagtctcactctttcaccagggctggagtgcaatggcacgatcttaactcactgcaacctccacctccctagttcaagccattctcctgcctcagcttcccgaatagctgggactacaggcgctcgccaccatgcccagctaatttttgtatttttagtagagacagggtttcaccatgttggccaggatggtctcgatctcttgacctcgtgatccacccgcctcggcctcccaaagtgctgggattacaggcgtgagccactgcacccggccgagctatgatcttgtcactgcattctaccctggacaacagagcaagacgttgtctcaaaaaaaaaaaaacacaaaaaaaacaagagagagagattgagagacagttaactggtttatcccaaatttatttatttaattttatttttaaattaaatttaattttttttttcagacagtatctcattcttttgcccaggctggagtgcagtggcaggatctcagctcactgcaacctccgcctcccaggttcaagcgattctcctgcctcagcctcctgagtagctgggattacaggcacgcgccaccaggcccagctaatttttgtattttagtagagacagggtttcgccatgttggccaggctggtcttgaactcctgacctcaggtgatccacccacctcagcttcccaaagtgctgggattataggtgtgagccaccacgcctggcctggattttgttttttttttttttttttgagacggagtctccgtctgttgcccaggctggagtgcagtggcgccatctcggctcactgcaagctccgtctcccgggttcagccattcccctgcctcagcctcccgagtagctgggactacaggtgcccgccaccacgcctggctaatttttttgtatttttagtagagatggtttcaccgtgttagccaggatggtctcgatctcctgacctcgtgatccacccgcctcggcctcccaaagtgctgagattacaggcttgggccaccatgcccggccccggatttcttgatctaaagaatgtccgccgggcgcggtagctcacgcctctaattccagcactttgggaggccgaggcaggcggatcacgaggtcaggagttcaagaccagcttggccaacatagtgaaacccccgtctctactaaaaatacaaaaattagccggacgtggtggcaggcgcctgtaatctcagctactcgggaggctgaggcaggagaatcgctttaaccctgaaggcggaggttgcagtgagccgagatcacgccactgcactccagccggggcgacagtgtgagactccgtctcaaaataaaaaaataaataaaacaaaaaacaatgtccaacaaaaaaacaaatccagcgaggccagacaggataggggctccctggggtccgcccattttcgggatcaggtgactcgaggtttggtccttattttagtgcaggctcagatgtcgggggcgagccaaagtgcaggggcctgtgggaaggacaggaggctgggaaacgtttgggtaaaaaaatcaggacactggccgtgcgcggtggctcacgcctgtaatcccagcactttgggaggccgaggcgggccgatcacgaggtcaggagatcgagaccatcctggctaacacggtgaaacctcgtctctactaaaaatacaaaaaaattagccggcgtggtggcgggtgcctgtgtcccagctactcgggaggctgaggtaggagaatggcctgaacccgggaggcggagcttgcagtgagccgagatggcgccactgcactccagcctgggcgacagagcgagactccacctcaaaaaaaaaaaaaaaaaaaaaaaaaaaaatcaggacactgacagcacgtgctccagcacggggcagggcctccatggggtccgcgcccacgcggggcagcgcggtgacgtcacggctgaggaccccgccccacgaagggctcaccccacgcgacccacgccgctcgctcgcccctcccctccacgcagcactccggctgctccgtggggaaactgagtctggacttctcgtgcccgttcgggagaaggacgcgggaggcgcggccgagctgcggggagaggttgggctcaccccgggccagagcgagttcgcgcaaacgggagtgtccaccgctggcgggtcagccactagcgttggctacgcgccggtcactcgggcgacaggaggcggggcggcgcggaagttatcttccaatcaggtgctccgggggcgggtccggaaaactgtccaatcaaggcacggggcggacaccgggaagcggattgcaggtttgcagtagtgtccaatcgaaggccccaggggtgaagggggcgtgtccaaaacgctgtccgctcagagcgttgaaagggcgggggcttagagattgtccaatcagggcgccgcttcctgagctccgaggccccgagggcgggacgtttcgtcctccctgccgcgcgtgccctgcctaccacgagcggcccgggagtacctgtacctttcagctgcgccggccgcgaggccacggagagctcgccttggagagcccaggagcaggggagacatggtgagtgcgaggcaggagcagagccaggggacggtcggagcgacgggaaccggctggaaccagagtccgccgaagtctgcggccgggattggctgagggacgcgcggggcggcgcaggactagcacctgggacccggggacgccatcacagcggccgggctggaggactgggggcagtttggggggacggaaggggcggcaaggagcttgggggtaacttagggggaggcctgggcaggaggggggctggaggtagtttggggggacggtaggggcggtcaggggtcagggaccagtttggggggacggcaagggacggtcagcaggttggggatgttacgcgtgtccgtataagaggtcacctgagcaggcttagtgtgagccacaaggctgtttactcacttgggtgcaagtgggctgagtctgagaaaggactcagcaaagggtgatgggattattattggttttatttttttattttttttatttttgggacggagtcccgctctgtcgccaggctggagtgcagtggcgtgatctcggctcactgcaacttccgcctcccgggttcaagcgattctcctgcctcagcctccggagtagctgagattacaggcgcccgccctcacgcccggctaatttttgtttttagtagagacagggtttcaccatgttggccagaatggtctcgatctcttgaccttgtgatccgcccgcctcggcctcccaaagtgctgggattacaggcgtgagccaccgcgcccggcaatcattagtccttataggtttgggacaggcatcggagttaggagcagtttttttgaggacagttggtgggtgttacaaagtacattctcaagggcggcgacgatgtttcaaagtacattcacaagggcttgggggatgtattgtcacaagggctgggaggaatattacaaagtaccttcacaagggcgcgagcgtgtattgtcacaagggcggggtacattcacaagggcgaggaggacgtatcgtacaaagtacattcacaagggcgggggaatatcacaaagtacattatcacaagggcggggggcttgaccatggtgcggccagctcagagaaccttacaggggacagcttggggggatggcaagggacggcctgggggtcagaggcagtttgggggacgacctcagcggtgggagttagctgccctgggggttttgttgcagggtatcactaatgctgtgaaagctttattcgggcagccggtgtcagtaaatgtactgtactgttctcctgtttggcttttttcttctccttagtgacaataggaaaatgttcaagtgtgttttctgccttctggtccgtcaggataacacctgtttatcgtggggtacaggctaagcatggcctaaggaagtctctcaggaatattctgtctcccaccagaattgtagagaaagtgtgcgcagttccacatcttatagcagctagagatggattaaaatgttcataaaaatagtagtttttcaaatgccaaagcaatcagacaaaaaataatagttattcttccatacaaggtgcagagtttgcgacagtgtgtgatcgtgttccatttcagttcagctagacatgagattaatgcaaattctgcaaaaacctgtaaaactgaggcgtgttccattctggttagtttccagtttgtcaccaggagtattgcttcactgatccatcatctgtttgctgactgggaaaagcagtttctggccatgtaaagtcataaagactgccttggaactcccttcccccacttacacaaggggtggaaagcactgattctgctgcattctcactctacgggatgagggtctttgtggcatttaaagtgtagcacctggagcagggaggtgagccccaagaccggtgactccagctgagcccacagttgagcctgcactggaggccgctgagggtgcagcggggtctggctgggcagcctccacttgctcagtcctcctgcctcgtagaacagccgcagcgggaactgttcatgctgattgaggctgctgagcatgggaaagacgattgtcctggagatgtgcttgtgggcgttttagcctttctgaggttgcacctgtgctgtcttggagccgtttctaagcagtgggtttagtttatgctttaagtgttgtttttcttttttggagacactgtgtctcccaggctggagtacagtggcgtgatctccacacattgtatcatccgcctcccgggttcaagcaattctcctgcctcagcctcccgagtagctgggattacaggcacttgccaccacgaccggctaatttttatatttttagtagagacggggtttcgccatgttggccaggctggtctcaaactcctgaccttaagtgatccaccctcctccgcctcccaaagtgctgggatttcaggcgtgagccaccgcgcccggcctggattaagttttaatataaacaccagtggccttactgcccgcataaataggcctccggcctctcttcaacacctgtgtgctgctcccagcgctcatctctgttctgcccccagggtaaccactgtcctgattttttttttcattctctctacctttaccatttattatttatcaccatacagagttttaattttgcctcctttgaattttttttttttttcaggcagggtcttactctgtcgcccaggctggagtgcagtggtgcgatctcggctcactgcaggctccgccctccggggttcacgccattctcctgcctcagcctcctgcgtagctgggactacaggcgaccgccacctcgcccggctaattttttgtatttttagtagagacggggtttcaccctgttagccaggatggtcttgatctcctgacctggtgttccgctcgcctcagcctccgaaagtgctgggattacaggcgtgagccaccgcgcccggcccattcctggctaatttttatatttttttgtagagacggggggcctcgctgttgccccaggctagtctcaaactcctggactcaagcgatctgccctccttggcctcccaaagtgctgggattacaagcatgggccactgcacctggcctgaaatttcaataagtgactgtgaccattaatgcaccgtgaatagcagctcaaaaggcttttctgtggtttctttcctttgcgcacatgctggtgtctgagacagtgggtgacgcagttagttcaatcattccagcgtttgtcaggcttgggttaattcaagtgtgttcatttattttgtgtacttatttatttttagagacaaggtcttgttctattgcccaagctggagtgcagtggtgtgatcgtggctcactgcagtctcaaactcctggctttaagtcatcccctcacctcagctttccaagtagctgagaccacaggtgtgcaccaccacacccagccaaagttttttttgtttgtttctttgtttttgtttgtttgtttttgttttttttgagacagagtttcgctctgtggcccaggctggagtgcagtggcaccatctcggctcactgcaacctccacctcccgggttcaagcaatcctcctacctcagcctcccgaatagctgtggttacaggcatgtgccaccaagcctggctaatttttacacttttagtagacacagagtttcataatgttggccaggttggtctcaaactcttggcctcaagtgatctacctgcctcagcctcccaaagtgctgggattacaggtgtgagccacactgcacctggcctccctcgtagcttactgtctgtgtgtgggcatatgtgagcactttccatgcctggacgttgtaagaactaacttctgaatgggctctgctcttgtcattcacagtgagatgtgcattatgccgacgattgaacttgcagttgatgtggatgttccttattctcccatagatagcatctctccttgcccaggtgttaaactgcccctcgtttccagcattgttgcaacgcttgctctgtcatatattcatgcaccataaacacagcttcccatccttttgtgttggtctatttgtccatcctgacgataccatcctctaattactattttttctttttttgagatggagtcttgctttgttgctcaggttggagtgcagtggcacaatcttggctcactgcatcctccgtctccagggttcaagcgattcttctgcctcagcctcccgagtagctgagattacaggcacatgccagcacgcccagttaatttttaaatttttagtagagatggggtttcatcatgttggccaggctggtctcgaactcttgacttcaggtgatcgccccccccccctcggcattccaaagtatttgcattacaggcgtgagccactgcacctggccctcctaattatgattgtgatttaagtgccttgatgtgttttagaattgtccctctaccggcggaggcgggcggatcacgaggtcaggagatcgagaccatcctggctaatagggtgaaaccccgtctctactaaaaaatacaaaaaattagccgggtgtggtggtgggcgcctgtagtcccagctactcgggaggctgaggctggagaatggcgtgaacccaggagacggaggttgcagtgagctgagattgcgccactgcactccagcctgggtgacagagcaagactctgtctcaaaaaaaaaaaaaaaagaattgtccctctaccttgttctgtaggaaacctgattgttcttagacatttgcctttcatttcagttcttagaagtagtttttcataaattcaaaaacaaggaaaaaaaatgaggctggttttggatgtaatggaattgtattcaaaccccagatcggtctgagagatctgctgacgtggtggcattgtttccttcctcagtccgcgtgccatctctcatttctctctcctttgatgtcattcggtagtgttttataattgttccatgatgattgttttatatccttcattagatataaaattcctctgttgcccaggctggagtgcagtgatgcaatcatggctcactgcagcctcaaactcctgcactcaagcgatcttcggcctcagcctcctgagtagctgggactgcagattcatgccaccacacccagctaattaaaaaaaatttttatagagctggggtcttgctgtgttgcccaggctggtctcaaattcctgggctcaagcgatcctcccgcctcagcctcccaaagtgctgggaggaaaggcgtgagccatggtgcccggccctgagtgtgaattttaaaaggctaatgcccaagcagtgtatcttagtaaggacaagcaggcctgaaggagctttggaacactgaagacagagcaagaaaaatatgccagtggggctcagatcaagtattttagcaatgttgattattctgttgtcattgtggagttgattgcacagccttgcccgtctacccatatgcaagaagcagcccctttgccgaaaccgccccctccctagctggccagtaaagaaacagtccaaagccacacggtcatctgctgcgtggctaccagggagcgtcgtcctggctgtgaagcttccagacagtcactgtctgctgtgtgtggttagaaggacttggacatccgtgttgtgtgcgcacaagactgtcctcgggggatgggccagagggcccaggtttgcctcggtgccataagtatcatttccatttcaggaaggaggttctgtggacccgtgagtgtcaccaccggaggcatcagggcagctccgggcagagaggcacagggcccgtgggagcctcggtctctagtgggctgtggaggccacatgggaggacagtgtcttgcaccagatccccatggccaattcaccgccactgggactggtctgagattccctgaggctggagcggaggcttcgagaacctctccagaggagtccaggcggggggtgggggcggggcagagtggaatcctgtcgtcattgcattttccacagaatctagaacctctgttgtcccacaagtaggctgatttctgatcgcacagatgggtcagagtaaaacctgtaagtgaggaatacgttctctccaaaacccagatagacctaaaaagtgttaggcttgctctggccgtgggtgttgataaatgaggtatgcttcctgcctgggctgctgcttcaaataacgaccagaaatatgaacaaagtggtggggacttgagtctagtggggtgcagcagctcgccccacctggaaagttctgcagcaggcccacgagcctgtccccgtgcctggctcttccgaaagcgcaaattaaatctctaaaatctaaaaccctctcatccccaaggccagctaccctcttgcacttcataatgtcataggaattatttttcccccatcctacacttcagtaggattttcattatcgttatgtcacagagagatccattcttttccattggttcgtttgtccatccttctgctaatactgtactggcaagattgacagctcttaaatccttgccctgtgttaggtaagccttcaccctgttcttcggaaagttttggctatttttagactctttttctctgttagatttggaaagtagttttgtcaagtcctaaaaagtctcattaagagaggatctcactctgttgcccagactggagtacagtggtgtgatcacagctcactgaaacctcctgggctcaagtgatcctgctgcctcagcctccctagtagctaggactgcaggcacatgccatcatgcctggctaattttaaaaataataaaaaaattgtagactgtgtctccttatgtcgcccagggtggtctcaaattcctggcctcaagcagtcttcctgcctcggcctcccaaaatgctgggattatgggcatgaaccacctcacagggccccaatcaagatttgtttctccattgaaatcctttactagccttaagtacttatttaactttggattttcccatagtatgtatcagcttttaaaaattaattttccaactattatgaagtagaaacataatgcaatttcttggaatcttggtaaaaatctttttctaggattatctctttgttctgttggggttttatgtgcataattcttagaaatttgcaaaaagacaagtttatgttttataattcttgtatatttcctggtggtgctggaactagtataacgttgactagaggtgaggtcatgggcgtcttcattttgtgtatcatgtttttgaggaagacagtgaacttcacattctttatgttttttaaaaaccagctttactgacatatagaacgtacagccatttaacgtgcacatttcattgttgttgttatttttttggtttttttttttttttttgagacggagtcttgctctgtcgcccaggctggagtgcagtagcgcgcactcgaagctccgcctccccagtagctgggactacaggcacccgtcaccacgcccggctaattttttgcatttttagtagagatagctaggatgatctcgacctcctgacctcgtgatccgccctcctcggcctcccaaagtgctgggatgacaggtgtgagccactgcgcccggccattggtttttacagtcacagaatcctgcaaccaagaccacagtcaacttgaggacatttccatcacctcacgaagaaacccccagacccttcagttatcactctcctattgccccggagcccctccaccaccctaagaaatgactcatctgcctctgtctctagagatttggctgttcttgacatttcgtatgttgtttctctttttttcctttttattcttttgttcttttgacatttcatatgaatggaatcctaatatgtgttcttttctgacggcttctctcactgggcatgttttcagggtcattcatgttttagcctgttagagctccattccttacatggctgagtcatatctactgtgtgggctgtaccacattttgtttatcagttgatcaactttgagttgtttccaccttttggctattgtgaatagtgctgctgtgaacatttgggtacaaatgtttctttaaatgttttcaaatttcttcagtatatatttaggagtggaatttccatttgataatactatgttaactttttttccttataatagattttattttatttatttttgtttttttttttttttttgagacagagtctcgctctgtcgcccaggctggagtgcagtggcgcgatctcggctcactgcaagctctgcctcctgggttcacgccattctcctgcctcagcctcccgagtagctgggactacaggcgcccgacaccacgcccggctaattttttgtatttttagtagagacggggtttcaccatgttagccaggatagtcttgacgtcgtgatccgcacgcctcggcctcccaaagtgctaggattacaggcatgagcctctgtgcctggccggtatcttgttttaatttgcatttccctgatgacatgatgtggagcattttttatatactcatctgccatctatatcttcacagatgagttgtcttaaggtctttagcctccacacctggctaattttttcttaattttagaaatggggtctcactgtgttgcccagggtgatgtgaaactcctgagctcaagcaatcctcccaccttggcctcccaacatgctgggattacaggcatgtgccaccacacctggcctatttgtacatgctttactctacatcgcactctcctgatgactacagctctccagaaagcctggaaaatgcatagtgtcagtcttccaacttgaaccttccccttcaatactgtgttggtattttgagtcttttacctctccatataaactttacaatcagtttgtcaatatccaccaaataacttgctgggattttgattgggattgtgttgaatctatagatcaagttgggaagaaccaatgtcttgacaatattgggtcttctatacgtggacatggaataactattcacttagttctttgatttcttctgtcagagttttacaattttcctaagatcttgtgcacattttgttagatttatacctgtatgttttattttagggcaatgctgatttaattccagtattgtctaagagcatatgatgtacgatattcttttaaacttgttaaggtgttttatgtcccaaaatacagtctaggttgaggagtgttccacgtgagcttgacaagaatgtgttttctgctgttgttgaagttgtctacagacattcatcattgggggtgctgttgaattcaactctgtgcttattgatgttccacgtgcttgatctgtttcttttcttttctttttttttttttttttttttgagacagagtctcactctgtttcccaggctggagtgcagtggcgcgatctctgctcactgcaagcgccgcctcctgggttcacgccattctcctgcctcagcctccccagcagctgggactacaggtactccccgccatgcccagctaattttttgtatttttagtagagacagggtttcaccatgttagccacgatggtctcaatctcctgacatcgtgatctgcccgcctcggcctcccgaagtgttggggttacaggcgtgagccaatgcgcctggcctaatttttatatttttagtagagacggggtttccctgtgttggccaggatggtctccatctcctgacgtcgtgatccgcccgcctcggcctccggaagtgctgggatgacgggcgtgagccaccgggcccggcctggttactgttttctgtttttgttgccctggttcgttgttccttattttgtcttccactctttttctgccttttttggttttgattgcatgttttgtgtgattccattttttctcctttcttagcaagtcaggtatgcttctctttcctttttttagtgatagccctagagatatttatttatttatttggcagggtcttgctctatcagccaggttggagtgcagtggtacaatcatggctcactgcagccttaatctcctgggctcaagccatcctgttacctcagcttcccaagtagctaggaccacagggtatatgcctccaagcccagcttatttttaaaaactttttgtggccgggcacggtggctcatgcctgtaatcccagcactctgggaggccgaggtgggtggatcacctgaggtcaggagtttgagaccagcctggccaacatggtgaaaccctgtctctacaaaaataccaaaaaaattagctgggcatgatggcgggtgcctgtaatcccagctgctcgggaggctgatgcgggagaatctcctgaacccgagaggcagaggttgcagtgaactgagattgtgtcatcgcactccagcctgggcgacagagggagagtctgtctcaaaaacaaaaaaaaacgacaacaaaaaaaactttgtaaagacagggtgtcactatgttgcccagactggtcttgaactcctggcctcaagcaatcctcccgccccagcctcccaaaatgctggcatttcaggcatgagccaccgcacccaacctagaagttttcattacatgtcttcaggctcagagtctttcctcagccacacccagtctactcatgtgtccattaaagtcattctccatttctgttacagtgcttttcaaatctctcccatggctttttcattcttaggatttccacttctcagcctgtattgcctgtttttgcatgttgtctactttttccattagagcacttcacctgttaatcatacttgttttaaattcccagtctgataattccaatgtccctgccatatatgaggggttctgctttatctcttcaagctctgtcttttgccttttagtatgccttgtcatttctttctggaaagccagacgcaatgtactgggtgaaaggcactgaagtaaatagacctttagtaacccagtggtgagatgtgggcagagggcaaggattccctgatcctttgatgacgtctcagtctattcttgagcctgtgccccgcgacactgaacttcacaagtgcttctcagttcttccttctcctctcacttggcgggacaagatgaatagaggaagatgatgggggatacatctctttccacaggtaatttagacactgatgaaaccccaacaggtgaggctctgatcaaatagttttaagggaaaggcccggtgagaaagagcagaaatatctagcctatttcaaaatcattattcttctcctctacaagactgggccccctgagattgctaactcagacttgggcccgctgtgcccccagcaattcatcagttacagctcagggtttcccatctaagtaacggttcccacagaggcttctgttcatggttgcgtgttctggtaagttatgactctctgtatccgcctctctcttcagtttgagggggcagagcttgccttgtgacatcagttctctgaaggatggaagaagagcttgttgaggtttcagtttgttcagctttttgttacaagggaataataacttccaagctccttacatgctggaccaaaaactagaagtcatttaacttttaaaaagaactgccacactgttttcttaattggttgtaccattttacattcccaccagcaatgtgtgaagattcctgtttctccatatccttgccaaaacttattttcttttttagttttttattttacccatcctagtgggtgagaagtggtatctcctttttgttttgatttgcatttctttgatgactaattactgacaatgtttatttttcttggagaaatgtctatttacatcctttccccacttttttgttgttgagactgagtcttgccctgtcacccaggctggagtgcaatggtgcgatctcggctcactgcaacctctgcctcctgggttcaagcgattctccctcctcagcctcctgagtagctgggattacaggcatccgccaccacgcccagctaatttttgtgtttttagtagagacggggtttcaccatattggctcagctggtctcaaactgctgaccttgtgatccacccacctctaaagtgctgagatgacaggtgtgagccactgtgcctggctgctaaatcagttttgtttgatcttttcaaacaactagctttggtttcattgatttttctctattgttttactgttctctatttcattaatttgcctgtaatatttattatttccttactcctaattgcttaggtttagttttattttcctattgtgtcgaggtggaccacgttaggttgttgatttgcaatctttaggataggtatttatagctattaacttcctttatataagttttggtatattatgtctttattttacatccatctcgaagtatttcccttttgatttctctttgatccattagttatggaggagtgtgttaatatccacatattagtgaatttgccaaattttctgtattagtttcagatttcatttctcattccattgtggtcagagaacatacttatttctggttttttttttggtggggggagactaactctcactctgtcagtgatgtgatcagagctcactgcaacttctgtcttcaagcagttctcgtgcctcaccctcccaagtagctgggaatccacgtgtgtgccaccatacccagcaaatttttgcatttttagtagagacagggtctcactatgttgcccaggctggtctcgaacacctgagctccagcgatccatctgccttgatctcccaaaatcctgggattacaggcgtgagccaccgcgcccggccaatattttgtatttctattgtttaaaatgtgttgaggtttcttctatggcctagcaaagggtctcttttacagaacgttcttctgcacttgagaagaatgtgtgttttgctgttgttgggttcagtgttctgcagatgtctgctatgtctaaatgacttatagtgttcaattattttatttcctcgtatttcacctagatgttctctcattaaaaagtggggtaattgatgatgctgtgctcaactaaaaaagaaaaaagaatgggtgtttatgtttcaacttgtatttttaattatccatttcttttatttttatttatttttttgagtcttgctctgtcacctaggctagagtgacattcttggctggagagcacaatcttggctcaccgcaacctccacctcctgggttcaagtgattctcctgcctcagcctcctgagtagctaggattacaggcacgcaccaccatgcccagcaaaatttgtatttttagcagagacgggggtttctccatgttggtcaggctggtctcaaactcccgacctcaggtgatctgcctgcctcggcctcccaaagtgctgggattacaggcgtgagccactgcacccggccactactttcattttcattaagtattttctaatgaaacctttcagttgtttaactttttactgtttgttggtctctttaggggttactgtattgtcaatgcgaggcttatcagatgagcttcgggtttatattcatcgctcgattccagtgagatacagaaatgctgcgtgtgtagctctattccttcctgcccctccaacttctatggcaatatgaatacatgctacatccatgaatattatatgccaaaacagtgcgttttaattagtactttaccatctgtagtcatgtccctttgcttaaatatgcctttgctccctcccaccctcctcctctgtgctgttattggcaaataggtattcttatgtgttatacatccaacagtgctttccaaacatattcatacagttgcctttaaaataatttaagaaaataaaggggaataaagggggaaaacggatacaatgttgcctagggctccaggcagacaaagacaggaattcttaagtcacattgttagaaactccctggccagcctcaggcccgtccatacaaagatcccctcaccaggcaggggattccaaggacttaccattttctgcagtagctggtggaaggcttttccgaaagtcctatgaaatgtgcatcgtttggacaaccgaggcctgctgcgttatgcaacgtttcaaatggaaaagttacttcatttgcatagcatttctctagaccctcctggtagaggaaaataagagcagtcgcagtaaaaaggcagagataagttcagactgatagtggtgccatgaagtttactaggaagtgattgtgaataagtaaaagatctaacattcgcgtcatagaggaggtgttgggacaccacagaatcttgtttgaatttatgaattgagtccagttccccagtactttcagtgtctccaatcctcctgcacacctgtgtggtttgtcttaggactcagtggtctttgaggatgtggctgtggacttcaccctggaggagtgggctttgctggattctgctcagagggacctctacagagatgtgatgctggagaccttccggaacctggcctcagtaggtgaggatggcatcattccttcccttggtttttaatgaactcatttctttctcatcagttctgttgcaagatgtgaaatgtgggaaaggactaagacagacatgttcacagccaccatggacctagaatctagtcattattccctaacagtgaaaacatgtgtgaaacagatgttatttctgtcttggtttaaaggacttgaagttcctttagtgtcattagtaggggtatagatttcactggtcatttaggatcacagagtggttccttgtttgatacctgtgacttactgtgtttgtgaaatacctaacattttgaccccttatgtctgttattgatgaggtcctcaaaatgctaaactcctcagtgtcttcctttgcttaatacgtgtcttattccttttgagatttgtttacttttttgttgcagatgatgggactcaatttaaagccaatgggtcagtttctctgcaggatatgtacgggcaagaaaaatctaaggaacagacaataccaaacttcacaggaaataattcctgtgcctacactttagaaaaaaattgtgaaggctatggcactgaagaccaccacaaaaatctgaggtgagttgcactcacaagagaaaaatccttgtatgcaattaaatatatatctaagtattgctccaaatataagcattgctccaaatttgtttattcctcagaattttaaccaaaaaaaaaaatttgtatttgactaagacattgagaatttgaaacataattgttagaagtaattacagggggccgggcgcgatggctcacgcctgtaatcccagcactttgggaggctgaggcaggcggatcacgaggtcaggagatcaagaccattctggctaacatggtgaaaacccgcctctactaaaaataccaaaaaaaaaatagccgagcgtggtggcaggcacctgtagtcccagctacctgtgaggcggaggcaggagaatgctgtgaacctgggaggcagagcttgcagtgagctgagattgcgccactgcactccagcctgggtgacagagtgagactccatctcaaaaaataaataaataaaaagaaattacaggaaaaccccatatataataaatactgcattaaaaaatatgtctcttcaaacaattcagaatagaaaaacttcacgtatactgaaatgtagttagacattatttctaatacttgttaatacatctcaacacatcattactaaacataccatacataaaaatgtctctcatttttaacagaaatcatatggtggacagattctgtacacataatgaaggtaatcaatatggagaagccatccatcaaatgccagatcttaccctgcacaagaaagtttctgctggagaaaaaccatatgaatgcaccaagtgcaggacagtcttcacgcatctttcttctcttaaaaggcacgtcaagtctcactgtggacgaaaagcacctccaggtgaggaatgtaagcaggcctgcatttgtccctcacacctacacagtcacggaagaactgacactgaggagaagccgtataagtgtcaagcatgtgggcaaactttccaacatcctcgttacctctcccaccacgtaaagactcacacagcagagaaaacctacaaatgcgagcagtgtcggatggcgtttaatgggttcgcaagcttcactagacatgtgagaactcacacaaaagacaggccatataaatgtcaggaatgtgggagagccttcatttatccctcgacatttcaaagacacatgacaacacacactggagagaagccctataaatgtcagcactgtgggaaagccttcacttacccccaggcttttcaaagacatgagaagacgcacacgggagagaagccctatgaatgcaagcagtgtgggaaaacattcagttggtctgaaaccttgcgagtccacatgaggatccacactggggacaaactctataaatgtgaacactgtgggaaggcttttacctcttccagatcattccaaggtcatttgaggacgcacactggagagaaaccttatgagtgtaaacaatgtgggaaagccttcacttggtcctcaacgtttagagaacatgtgagaattcacacgcaagagcagctctataaatgtgaacaatgtgggaaggcttttacctcttccagatcattccgaggtcatttgaggacgcacactggagagaagccttatgagtgtaaacaatgtggaaaaaccttcacttggtcctcaacgtttagagaacatgtgagaattcacacgcaagagcagctccataaatgtgaacactgtgggaaggcctttacctcttccagagcattccaaggtcatttgaggatgcacactggagagaagccttatgagtgtaaacaatgtggaaaaaccttcacttggtcctcaaccttacataatcatgtgaggatgcacactggagagaaacctcacaaatgtaaacaatgtgggatgtccttcaagtggcactcctccttccggaaccatctgaggatgcacacaggacagaaatcccacgaatgtcagtcatactcaaaagccttcagttgccaagtcattctttctaaaaccagtgagagcacacactaaagagaaattctataactttaatggggtaacctcacattaattcatgtataatgctccagaaaattcacaccaggagagaaatcttacaagtatgatattgtctttgtcaatacctcatttgtaaaacagacccattagtcgtgaatttccagctctttcaaaaataaatgtttatgtgagaaaataattctctaagtcctctttcagctatagtacctaagttttaatagttaagtgttttgtctcttaaatattttcatttcgaactgtattagacccatggtgatttgaagcatactttgaacatgacacaatttttttttttattttttttttgagacagtcttgctctgtcacccaggctggggtgcagtggtgcgatctccactcactgcaagctccgcctcccaagttcacgccattctcctgcctcagcctcccaagtagctgggactacagccacctgccaccacgcctggctaattttttgtatttttagtagagatggggtttcaccgtgttagccaggatggtctcgatctcctgacctcatggtctgcccaccttggcctcccaaagtgctgggattacaggcgtgagccaccatgcccggccaaacatgacataatttttatagtttctatatttttctgtatgggatcattacaacaataaaactttggtatttcttactggcctactgctacagatagtggatatcacttacctattttatatattgtaccttaccaaatttttttttgcaaaacctggtaaatatgcagagttctctataaagtatagtctctaatcatcttttgcaatttgtttttcctcatttctcactgggagttagacagcagcctttgaattaggaatggggacctacaaaacaagaatgaaatctgtagatggttttgttacggatatatgtgtaaggctgggaacgacatttccctgaatgtctttcctttatggcaccaagttaaaatctgctgattttctactgtgcatgaggtttggcagtcaggactagagaagtcattacccgctttgtagagccagcatactcagagacataaaggtggcacacaggcgcaccatgcacacagccttctggatcattgtactcattcctgccactgttaatgaagagtgtctctacaacagacaccagctgcctaactttcagccagacatctccatgagctctcccaacatgaagacatttagtgtggattgctacaacacctgccacgtccaccaggccactgattctgactgtcgtggtgatcatctctgaagctaactccctcctttaggtcttaccttatttttattttatttatttatttttgagacatagtcttgctgtgttgcccaagctgaagtgcagtggtgtgatctcggctcacaacctctgcgcctcccgggttcaagcgattctcctgcctcagcctcccaagtagctgagactacaggtatgcaccaccatgccccgctaacttttgtattttcagtagagacagggtttcactatgttggccgggctggtcttgaactccggacctcgtgatccacctgccttggcctcccaaagtgctgggattacaggtgtgagccaccgtgcccagcccaggtcttaccttatttttatactaaacattttcttttgttctcttagtactgcttatggttctgtgtgcagacacaaccatgacagcctatgcaccagccaaaaagcgcgcacacacacgtttgatcgtgtacagcatcgctgaatgactacttagtccatgtaagaataatcacctctcatatcaggcagactggtggagtttcctattactcagagccgagtgcaacccttcagtatatgttcaatactatgtttaattatatgctattaagaacaagacactttttgtcaaattcctctgtagtggtttcttagattttatcaaccatgttcagataaattatataataacaaatatttttactctgaagatataaatattccattgcaattatggaatatgaaatcaactttgtaattctgtcagtttaggcactatctattagcattcccagatgtgtaccagctcatgcactcttcttaaaggtcaatttttcatatacttaaaacttttgacattaacataaattcttttttttttttttgagatggagtctcactctgtcgcccaggctggagtgcagtagggtgatctcggctcactgcaagctccgcctttgggttcacgccattctcctgtctcagcctcccgagtagctgggactacaggtgcccgccaccacgcccagctaatttttttgtatttttagtagagatggggtttcaccgtgttagccaggatggtctcgatctcctgacctcgtgatccacccgcctcagcctcccaaagtgctgggattacaggcgtgagccaccacacccggcacttctaccctgacaatcttaaccaaagaactactcagggctgtttaaatggtggggagcaatagatacacaggtgtgcattgttggagttaacagtaatgactccccgtaacaataaacacgggtatgcttcagcttcatttttgcaatggtttaaacttttaggccatgtgatatgcggccatgaatttgaacatgattgtcactgatcagagggttcccatttgatgtggaccacagagcatcttacctacacaagttgtaagttgagtgttagcctagctcctgctgcagcaggtccctcccccagcctcctgcattccaacctgggtgccgggtgacatccaacatctgacggctatgatgttaaggctacaaatgctgcatttgatactgggggcacaattgccattattttataaagggggggccttcataaaagcccgggcgcggtggctcacgcctggaatcccagcgctttgggaagccgaggcgggcagatcacgaggtcaggagattgagaccccagtgaaaccctgtctctagtaaaaatacaaaaaattagccgggcgtggtggcgggcgcctgtagtcccagctactcgggaggctgaggcaggagaatggcgtgaacccgggagatggagcttgcagtgagccgagatcgcaccactgcactccagcccgggcgacagagcgagactctgtctttaaaaaataaaaaagcctttgtatggcaaggctcgccaggccaggtggctgacgcccgtaaatcccaacactttgggacgccaaggcaggcagatcacttgaggtaaggagtttgagatcagcctggccaacgtggtgaaaccccgtctttacttaaaaaatacaaaaattggctgggcgcagtgactgatgcctgtaatcccagtttctcaggaggctgaggctaggagaattgcttgaacccgggaggcggaggttgcagtgagctgagatcacaccactgcactccagcctgggcgacagaacaagactctgtctcaaaaataaataaaaataaaagcctttgtcgtatgtggctcttgcatctgaatgttaaaaattgacataaaacattaaatttttgaaatttcataaatagtagagggttcatcttatacggagaatgactgcatggcaaacgtgattgctgccaaaagctggagtttggtaagggcatagccaggcactgtgacctccacccattcctgacactgggctcttgaccccccacctgggggatgcctcactgctgatggcttgtgtttggctttctggattcactgcagtttgtaacagtggatggacagtttgaccctgcttccctcaccatctcctggtacacacaacttagtaaggtacttatccctcggaaacagacatcttttctgagctgctcactggataaatgatcaggacaaaagggatgggaggttacgtaaagccatcttgaaatttttttgataatttcatattttatcacaaccaatttttaaacctgtgtctttgagtaaatagcattaaaaggtttttctgtggaaaaactgttcctattccatacaacccttccagaagaaaggtctggataacactaaaggatgatttttttaaatgtaaaatgattgcccaatgggacacagtgactttgtaacaggaggaaatatccaaaagcatctgaggaggtggctggaggagggcagaggcgagtgttcatcttatttttcagaatctttcctgcaactttttccttcctcctgaaggaaaaccctctgtgctgctttccaaagtcccgtgagttctttttattttattttatttatttttttgagacagagtttcactcttgttgcccaggctggagtgcaatggcgtgatcctggcttactgcaacctccacctcctgggttcaagcgattctcctgccttggcgttccaggtagctgagactacaggcatgcgccaccatcctcggctaattttgtattttgagtagagatgaagtttcaccatgttggtcaggctcgtctcaacctcctgacctcaggtgatccacctgcctcagcttcccaaagtgctgggattacaggcgtgagccaatgtgcccgcccagtaagttctttgaacgcaaactgactgctgagcctagaccaccctgacacgccgtgagggagccacccagctgctattcctgccctgcagaacacccttagggccacagtggtgaaagtgatgatctgtggtcatagacaagcaaaccatgtggaactgactgcctcaggcagtccctctgaaatcggggactcaactaacctcattggacaggactgagaattctccctacagggggagtccgcgctgagtgtctgttaaccttcactgctgactaatggatgtcttgcttaggttgccctgacaattgtaaactcagtttccggcagtaccttgtgtgtcctgtgggactgtaatcaggtgtggaacctattgcaacaccgtctgagctgtggaagcttcaaattactggcaagagttctgctctaccacacacttggtaagttaggacaggtaaaaaggattcatacacaagtttaaggaggaagccaggtggctttctaaaatagacctttattttaactaagtccgaaacccctaaagggcatagctggaatcattcctgcaagctcattacccccatgctgtgacggtcttactgatgattattttgttgtaaagcaggggccaataggctgcactgcaaaaaacttagcaaaacaggcctgagtgctatcccttgaaaggcccgtttacaaggtcagctgtgtcaaaattgcacaagcaatatggtttatgcaaaacaccattcattccaggcatctggaatcttggtatttgccaagcagtgagtgcatcataaccagctggcaataaaaaaaaaccctggcagagtatctattgagcttctcaggttggtaaatagtcacacatgctgttacaattagtttcccgggcagtaaaagcatcttgtacgctgccaaccagggaggacccttggaagctcattcctggtttccccgacttcaccccatgtgcctcatccctttgctaatagttggctctgtttccttgcactgtaataagtcttagctgtaaggctgactatatgccagttcccttcagtacccctaacaaatcactgaaccactgggggtggccttgaggccccccagtacacttgacatcctgaaactgggaaattttaaaggcattttcataagagtggatggaagttttgtgttttaataatctgcaaagctcaaaaagcccattttgcttttcaaagatatgattttcataagtttgcacttccaccaaatgggctcacaggaaagagaagaaaatgtaatagctttctgtgtgcgtgtggtggggggcgttgtttctttgtagagatgaggtctcactatgttgaccaggctggtctggaactcctggactcaagtaatcctcctgcctcagcctcccaaagctctgggattaaagttgagagccaccacccctggccaatagctttgcattttgttaatgaggaaagcaaatgaaattctgtcaatttctcgatgttaagtactgcagagattaatatgacttaccatctcattgcacctcctgttcccagcttccctcccatcatacaaatgaagaaagttaagcacaaggaacacagaatcttaaccttaactcacatatcttgatgtaaacatagtaatttaacctctcagttttgaaggcctgttatctgccacctcttatacttagctctgtcgattgtttttttttttttttttccagacggagcttcgctcttgttgcccaggctggagtgcaatggcgcgatctcggctcaccgcaacgtctgcctcctgggttcaagcgattctcctgcctcagcctcctgagtagctgggattacaggcatgcccggccaactttttgtatttttagtagagacggggtttctccgtattggtcaggctggtctccaactcctgacctcaggtgatccgcccacctcggcctcccaaaaatgctgggattacaggtgtgagccactgtgcccagcctgtcaaatgtttttaaactgaaaattctacaagacaataataggctgggcgccatggctcacacctgtaaacccagcacttcgggaggccaaagtgggaggattgcttgagctcaggagttcgaggccagcctgggcaacataaggagaccttgtctctactaaaaaaattttttttaattagcaaggcatggtgctgcatgcctggagtcccagctaccggggaggctgaggcgggaggatcacttaagcccagacgtttgaggcagcagtgagctatgactgtgcccctcccactccagcctaggtgacaggatgtgacccttgtctcaatcaatcaataaatgacaagtataattagctaattttacaaatatggcatcgaattttacaaacagggctcaaaaggctacatatttcacgtaacatgacattctggaaaaggcaaagatacaggtggctaaagcagatcagtggttaggggtgaaaggttgagtacaattgggcaatccaagagtatttggggagtgatagaatgttctctgttttggtggtgtaaatatgcatttatgaaaactcatagaaatacgcttaaaatagtcttactgtatgtatattaaaaataatcaacaacaacaaaccgctttcgcttactaagagaaaatgtaaactctcctgaactttgaaaacatgcaatgtggctgggcgcggtggatcacgcctgtaatcccagcattttgggaggccgaggtgggcggatcacgtgaggtcaggagttcaaggccagcctgaccaacatggtgaaaccccgtctccacaaaaatacaaaaaattagccgggcgtggtggcaggtgcctataatcccagctactcgggaggctgaggcaggagaatcgcttgaacctgggaggcggaggttgcggtgagcccgagatagcgccactgcactccagcctgggcaacaagagcgaaactccatctcaataaataaataaataaataattaaaatgaaagaaaagaaaagaaaacgtgcaacgtttcttttaccacctttggatactcaggaagcactgaaggtctgaggaaggagggctcatgccccaaatttgcctgtactgatgttaggaaatgccctttcgggccgcgcctgctaagaacgcttctgtgagatttcagtttattcacgtccccagggtcagatctttggagatgctgtggttttgaaaacctaaaagcgcactccagttctcccaaagggggacccttcctagtggggggtcctaatcctcaagcatcagccgaggacttggcttcaggccagtttcgactctccagctcccataacaacccagttccacgacttcttcccaacaagcctcattaaagacccgcacctgcaccctctcgggagcacagttgcggctgccgggagaaagagctggaaaaagagtggttgggtccatgttccacggacacccgccgaccacggccacagccaccccacagccgcgtagccacctcggctccccaggacaaccgcaaccaccaacctcaaaggcgccccaccacgaccagcgcagacgcacccacacccaccctaggttcccccgacccactgcctctcggtccccgacatctgcaggcgcacccacacccaccctctgtcccccacaccggcagccacacccaaatgcactgcccctcggtcccccacacccacaggcgcacccacacccaccctcaccagcaggcccacccacacccaccgcccctcggtccctcacacctgcaggcgcacctgcacccaactgcccctcagtttcgcaatcaccgaggccggaggcagtggctgcacaagcaccagccataccagaccccgaagctcaccgcagcacccgcgcagtcccagcccgacaactgcgccggcgaggtccctgccccgggggcttgtgggaaacggcgacctcaaacggaggctgcacagtcgctcaaagccccgcccatcgagctcctcccggcatgcagcgcgcctcgcctcttaagcctcgtcccgtggggccccctgggattgcggacgccgctgtagcacgggcgaacttccctacttctgcgagggcggctgctgtggtttttccaggcgacagaaaaggggactcagacagggcgaggcgggagattacggacatcctgaacccctgccccgcgttgcagcagcttgcggtcatcttctgggtctggggagtggcatctgtggcggggcccccacccacgatggacgatgctctgtgtatgggggtgactgatgacagagattctggagggaccagggggccgctgtgaggctgaagagtgggggcgatgatttgtgggtgtgtccgtgtctctggatgtgtccatccttttgtccctggaacaaatgtgatttttgtcagccttgggggctactcctgcgtgtctgggaggactcgcttgttcgtggcggtccctgtacctggagtgcggtgactcccaagtgtcagtggtctcagtgcacagctgtagttttctgcgtctctgtattcctagtctgaaataaccaaaatagaaaatagggccgggtgtggcggctcacgcctgtaattccaacactttgggaggctgaggcgggcggatcacgaggtcaggagatcaagaccatcctggccaacatggtgaaaccccgtctctactaaaaatacaaaaattagctgggcatggtggcctatgcctgtaatcccagctactcaggaggctgaggcaggagaatcgcttgaagccgggaggtggaggttgcagtgagccaagatctcgccactgcactccagcctgagtgaagcagcaagacttccatctcaaaaaaaaaaaaaagaaagaaaataaaatagaggccaaggacgctggctcatgcctataatcccagcactttgggaggccaagatgggtggatccttttagctcaagagttcgagaccaccctgggcaacatggtgaaaccctgtctctatttttttttttttaataaaaagaagaccaggcatggtggctcatgcctgtaatcccagcactttgggaggccgagccagctggatcgcttgaggtcaggagttcgagaccagcctggccaacatggtgaaaccctgtctctactaaaaatacaaaattagctgggcatggtggcgtacgcctgtaatcccagctgctcaggaggctgaggcaggagaatcgctcgaagctgggaggtggaggttgcagtgagccaagatatcaccagtgcactccagcctgggtgaaacagcaagactccatctcaaaaaaaaaaaaaaaaaaaaaaaaaaaaaaagagaaaatagaggccaagcacgctggcttatgcctgtaatcccagcactttgggaggccaaggtggatggatccctttagctcaagagttcgagaccaccgtgggcaacatggcgaaaccctgtctctttttttttttttttttaataattaaaaagaagaagaccaggcatggtggctcatgcctgtaatcccagcactttgggaggccgagccagctggatcggttgaggtcaggagttcgagaccagcctggccaacgtggtgaaaccctgtctctactaaaaatacaaaattagctgggcatggtggtgtacgcctgtaatcccagctactcaggaggctgaggcaggagaatcgctcgaagccggcaggtggatgttgcagtgagccaagatctcaccagtgcactccagcctgggtgaagcagcaagactccatctcaaaaaaaaaaaaaaaagagaaaatagaggccaagcacgctggcttatgcctgtaattccagcactttgggaggccaaggtggatggatccctttagctcaagagttcgagaccaccctgggcaacatggcgaaaccctgtctcttttttttttttttttttaataattaaaaagaagaagaccaggcatggtggctcatgcctgtaatcccagcactttgggaggccgagccagctgcatcggttgaggtcaggagttcgagaccagcctggccaacgtggtgaaaccctgtctctactaaaaatacaaaattagctgggcatggtggcgtacacctgtaatcccagctactcaggaggctgaggcaggagaatcgctcgaagccggcaggtggatgttgcagtgagccaagatctcaccagtgcactccagcctgggtgaagcagcaagactccatctcaaaaaaaaaaaaaaaaagagaaaatagaggccaagcacgctggcttatgcctgtaattccagcactttgggaggccaaggtggatggatccctttagctcaagagttcgagaccaccctgggcaacatggcgaaaccctgtctcttcttttttttaataattaaaaagaagaagaccaggcatggtggctcatgcctgtaatcccagcactttgggaggctgagccagctggatcgcttgaggtcaggagtttgagaccagcttgccaacatggtgaaactccgtctctactaaagatacaaaaaattagctgggtgtggtgatgcactcctgtaatttcagctactcaggagactgaggcaagagaattgcttgaacctgggaattggaggttgcagtgagccgagactgtgccattgcactccagcctgggcaacagagtgagactttgtcgcaaaaataagtaaataggccgggtgcagtgactcacacctgtaatcccagcactttgggaggccgaagtgggcgggtcacttgaggtcaggagttcgagaccagcctggccaacatggtgaaaccccgtctctactaaaaatacaaaaattagctgggtgtggtggcgcatgcctgaagtcccagctacttgggaggctgaggcaggagaatggcttgaacccaggagacagaggttgcagtgagccaagatctcaccattgcagtccagcctgggcaacagagtgagacactgtctcaaaaaattaaatagataaatacaaatacagaaaagccagctgtggtggtgtgcacctgtagtcccagttactcaggaggctgaggcaggaaaatcacttgaacctgggaggcagagcttgcagtgagccaagatcatgccactgcactccagcctgggcaacagagtgagactcagtatcaaaaaggaaaagaaagggtgggtgtggtggctcatgcctgtaatcccagcagttttggaggccaaggcaggtggatcacctgacgtcaggagctcgagaccagcctgagcaacatggtgaaaccctgtctctactaaaaatacaaaaaaattagccagttgtggtggcacacacttgtaatcccagctactcgggaggctgaagcaggagaatcgcttgaacctaggagatagaggttgagccgggcacagtggctcacgcctgtaatcccagcactttgggaggccgaggcgggcggatcacctgaggttgggagttcgagaccagcctgaccaacatggagaaaccctgtctctactaaaaatacaaaattagctgggcatagtggcgcatgcctgtaatcccagctactcgggaggctgaggcaggagaattgcttgaacccaggaggtgaaggttgcggtgagcagaagacgtgccattgcactccagcctgggcaacaagagcaaaactccatctcaaaaaaaaaaagaaaaaaaaaaggagatagaggttgtagtgagctgagatcatgccattgcactccagcctgggtaacaagagtgaaaatcatctcaaggaaaaaaagaaaaagaaaatggaggctcagtggtcactgccgccactcagcatcagcaatgcaacgaatgcattcttggctgcaacattaaaactgccagggtggagtgaggaaacaggttacgattaaggaacaagacgcttactacagaaatcatgtaaatatgagaagagttggagataaaggggttcacaggaagaaaggagatcactaaatgcagtagcctggaatggcctgatgaaaaccagagggatggtgaaatccaaggatctctgtgtacctgaatcctaaagaggggacggtggtggggatgcttgtggaacagtctatggagtgtgctaagaggaaactaaagtcaaatgtcatgttggctttgggggctgttctagactagcagagccagaagtcagaaaaatgtattgcaatttaggtccgtaaggttaccacgtgtttgtttccgggtagtctattagaactgagaataggcagggtgcggtggctcacacctgtaatcccagcactttgggaggccaaggagagtggatcacgaggtcaggagatcgagaccatcctggctaacacagtgaaaccccgtctctactgaaaaaaaaaaaaatacaaaaaattagctgggcatggtggcaggtgcctgtagtcccagctacttgggaggctgaggcaggagaatggcgtgaacccgggaggtggagcttgcagtgagccaagatcgcaccactgcactccagctgggggagagcgtgagactccatctcaaaaaaaaaaaaaaaaaaaaaaagaactgagaataatgccttcttcgcttctacttttcaaaactcatgtgccttcatcttctcatgaacattaactcacaaccataaacagaagggagtcttggatatatagtttccaaccttattagggctgacagtacaatcaagtagaacaagctatacactaactttcatcttcatgtcaaaaggtctttcttcttaatgcagtttgtccaatttccaaccaagatcaaggacagtgaacaagaaaatagggccaggcgtggtggctcatgcctgtaattcagaatatgaccagaaaccagttgagaatgatgtctgtcaagagtcttctataaggactaatgtatctgagttacacacaagtggtatccacaaggaacaaacaaatgtggaagacacattttttttttttttgagatggagtcttgctctgtcacccaggctgaagtgcagtggcgcaatctctgctcactgcaagctccgtctcccgggttcacaccattctcctgcctcagcctccagggtagctgggactacaggcgcctgccaccacgcccagctaatttttttgtatttttagtagagacaaggtttcactgtgttagccaggatggtctcaatctcctgacctcgtgattcgcccgccttggcctcccaaagtgctgggattacaggcatgagacaccgcacccagctggaagacacatctttaaataataaagactgaaggacactgggcatggagactcatgcctgtaatcccagcactttaggaggccaaggcgagaggactgcttgagcccaggagttcgagcctagcttgggcaacatagcaagacactacctctataaaataaaacttttaattaaaaaaaaaatgactgaagggaaaggcagagtgacagcaaattccagtacctgcaatagtggactggaaaagaaataacagtctcatgatcacacactggaaacataatggcaagtgggaatgaggccaggcatggtggctcacacttgtaatcccagcactttgggagcctaaggcggggagatcccctgatgtcaggagttcgagaccagcctggtcaacatggcaaaacccccatatctactaaaaatacaaaaattagctggacatgatggcacgtgcttgtagtcccagctacttgggaggctgaggcaggagaattgcttgaaccagggaggtggaggttgctgtgagccaagatcgtgcctctgcactccagcctgggcaacacagcaagactccatctcaaaaaaaaaaaatggccaggcgctgtggctcacgcctataatcccagcactttgggaggccgaggcgggcggatcacgaggtcaggagatcaagaccatcctggctaacacggtgaaaccccgtctctactgaaaaatagaaaaaattagccgggctattcgggaggctgaggcaggagaatggcatgaacctgggaggcggagcttgcagtgagccgagatggcaccactgcactccagcctgggcagcagagcaagactctgtctcaaaaaaaaaaaaaaaaaaaaaaacaagaaagtaggaatcaaaaacgtttcatctaaactcacaccaacttgtgcatccctgggtccaaaagacatttcaatggaaatgagacagattttatataactacaattatttaaagtcctaaattacaaaatatacatagctgaaagcgtacaaaacaggatatttattaaatgtttatatcacaaacatacactagaaattaatacaaaaggaatcactattaaggctgaggcatgtaaaggcaataccatattaatcataattaagagatttctctcctactctgaatttttaggtacaaaataagtgctataccaggttttcctacatgctctacataaataacgtttctcacatttacaacaaggttttacggttgaacactctcccaggtccactgtattcgtagattcacgctccagcatgtgttctcacatgtgcttgaagcgatgcgagatacctgaaggttttcccacactgcttgcattcatacggtctctctccagtgtgcgttctcacgtgcacacgaagggacgaggaacaactgtaggctttcccacattcagtacattcgtagggtttgaccccactgtgtgatctcacatgcttttgaaagtactgagcgtggctgaaggctttcccacattgattacattcgtacggtttctctccgctgtgggttcgcacatgctctcgaagggaggagtgacagctgaaggctttcccacaatgcttacactcaaagggcttctctccagtatgcgtcctcacgtggattcgaagggaggaggaaaaactgtaggctttcccacactctttacattgatagggcttcaccccgctgtgtgttttcacatgtcttctaaagtaagtgggacatccgaaggccttcccacactgcttgcacacatagggcttctctccggtgtgcattctcatgtgtgctcgcagagaggaggggtacctgaaggctttgccgcattccttacattcatagggtttctctccactgtgcgttctcccatgttctcgaagagacgagtaacaagtgaacgcttttccgcaatgtttacactgacagggtttctctccagtgtgcgtcctcacgtgatctctaaaggaggagtaacagctgaatgattttccacaatgcttacattcatacggtttctctccagtgtgtgttctgacatgttctcgaaagtatgagggacagctgaaggctttcccacactccttacactcatagggtttctctcctgtgtgagttcttacgtgccgtgtaaggtaggagtaatacataaaggtcttcccacatactttacatgcatgggttttctgcccatgatgactattcacatgtcccctgaaagatgagggacaaatgaaagcttttccacatttctgacattcataagactttttactgctgagacttttcacgtatgtcacagatgctgtccttgagtcctggcaattacagggtttctctacagtctgcgttttcataggagggctttggcaggagaggcagctgcaggcttgcccacattccttacacggtctctgtccagtgtgagatctctgccgattctcgaaggctttgccacacttagtgcactcagagggtttagcttcggtagggtaactcttgtgcacaagaaggttcgcagtctggctcaaggtctctccgcattgatgaccttcattactttcacagagtctccccagctgacttctgttcaaaatgggaagcaagctactagtcatgaatgactataagtgattaatttattaatggtttttagtgattattttgattacattatttgccaatttcactgaatggttctattttcagcactgtctgcctggtttctatggagaacaagcttaatgctctagctgaaggctcaactgcagccataaatttcacggtgtttcttttcttctttttttgagatggagtctcgctctgtcacccaggctggagtgcagtggcgccatctcggctcactgcaagctccacctcccaggttcatgccattctcctgcctcagcctcccaagtggctgggattacaggcgcctgccaccacgcctggctaatttttttgtattttagtagagatgaggtttcaccgtgttagccaggatggtcttgatctcctgacctcgtgatccgcctgcctcggcctcccaaagtgctgggattacaggtgtgagccaccacacccagcctttttttttttttttttgagatggagtttcactcttgttgcccaggctggagtgcaatggcatgatctcagctcaccgcaacctccacctcccaggttcaagcgatactcctgcctcagcctcccaagtggctgggattacaggcgtgcaccactacacctggctaattctttttcgtatttttttttttttcagtagagatggggtttctccatgttggtcaggctggtctcgaactcccgacctcaggtgatccacctgcctcagcctcccaaagtgctgggattacaggcgtgagccactgcgcccagcccacggtgtttcttatagatgaagtttcctgatattgtttccaactgtttcagacacgtgacattgacatcacatttataaaaatactctcttaggaaaagtctcagccagggacggtgaatcacacttgtaatcccagcactttgggaggttgagatgggtggactgcttgagtccaggagtttgataccagcctgggcaacacagtgaaactccgtctctacaaaaacacaaaaattagccaggtgcagtggtgtgtgcctatagtcccagctacttgggaggatgaggtgggaggattgcttgagcccaggaggcaaaggttgcagtgagccaagatccgtgccactgcacttcagcctggttgacagagtgagacccccatctcaaaaataaataaataaataaaataaaaataaaataaaataaataaaagtaattattaaaatatatttttaaaaagagaaaataaagaaaaagaaaaaaaatgtctctgtgggtctgaaattgtgtagttggtttatactttttttttgagatggagctttgctcttgttgcccaggctggagtgcaatggtgcgatctcagctcactgcaacctccgcctcctgggttcaagcgattctccttcctcagcctcctgagtagatgggattacaggcatgagccaccacgcccagctaatgttttgtatttttagtagagatggggtttctccgtgttggccaagctggtttcgaactactaacctcaggtgatccacccgcctcggcctcccaaagtgctgggattacaggcgcgagcccctgtgcccagccgatacttttctttgaattgcaagttagtttgatgctctgcggagaggcccatccctccggttgagcgccactcacctcagatgcctctgtgggatttggtgctgatctccagtgttatcaaatctccaattttctccaaaaatagaccaggaatcacttcctgtgaactttacaatctcttcatcattggatattccattcccaaaaacgtccctctgagaacttgatccactggttctaacataaatgtaacaatctgcaacaatcaattacacaatttcttaggagaaatatgttgggataaaggaaatagaccacatacggatttcttttcatatagtaatccaaaaatgtaccgtttataaggaagaatagacatgctatcaaagtgagactctgaggacctcatctacttgagaatttggcaataataaaaagcagatgagccgggtgcagtggctcatgcctgtaatctcaaagcactgcggggccaaggtagaagaattgcttgagcccaggagttcaagacaagcctgggcaacataggaaaataaggagacctcatctctaaacaacaataaaaaatttaaattagccaggcgtggtgttgtgtgcctataatcccagctccttgggaggccaaggagggaggatcacttgagcccaggaggtcaaagctgcagtgggccatgattgcaccacggcactgcagcctgtgtgacagagtgagaccctgtctcaaaaaaagaatagtgctggatgcggtggctcacgcctgtaatccctgcactttgggaggccgaagcgggtggatcacctgaggtcaggagttcgaaaccagcctgaccaacatggttaaaccccatctccactaaaaatacaaaaaatcagccgggcatagtggcacgtgcctgtaatcccagctactcgggaggctgaggcagaagaatcacttgtacctgggaggtgggggttgcattgagccaagatcgcaccattgcactccagcctgggcaatgggcagtaagagtgaaactgtgtctcaaaaaaaaaaaaagaagagataaacgtggcaacccatttactaagaaacagaatagttccaaacagatggagactgatgtttagtaaaatattatcagaaaagcaaagtttgcacatgcacaaatgctcctcgtatacgaggaaatccagaggctttcccctgcgaaggaggacagtgcaggggggtgcaggagaagccacacagggcagctgagagaggacacacctcctcctcctcagagaagggtttgtgtttcttttttttgttttgttttgttttttgagacagagtctcacactgtcaccaagactggagtgcagtggcactttgttggctcactgcaacctccgtgtcctgggttcaagcaattctcctgcctcagcctcccgagtagctgggattacaggcacctgccaccacgcccgactactttttatatttttagtacacatggggtttcaccacgttggccaggctggtcttgaactcctgaccttaggtgaaccacccacctaggccttccaaagtgctgggattacaggcgtgagccactgcgtgcggccaggggtttgtacttctaacccacgatgccaaacggaaccttcttatccagaacccactcctcccgagggctgctgctctcctggtgctcacaggcacagggcccttacaggagtccttcctccactatgcccggctgccctcaggtgtgagcaccacccattcctggagaatcacatgatgaggaaggattgtgaagggcaacaaatgttcccctgagacaggccaacactttgacttcccagaccaccgatgatgtccgagtgtgagttttaattgcagcaaaattaccatgtcaaacgtggattactcacagtgtaacttggatttactttatcacagtgtactttgattttcaaagtacagttactctgtgtggtgaaccacaaagctgcttttgttgccccaacgtgacacagaatactctactcagacttataaaatgtgggcagccaaggactggtgatcaagaaaacctaaatatcaatcatacacaaaactttgttttcatggagaagcattttgactcccatgttccatgggtgttgggatcatgtctatctcttttccaacatatttcaatttttgagctcaaataaaaagaaaaacaaggtatcttaggccgggcgcggtggctcacgcctgtaatcccagcactttgggaggccaaggcgggcggatcacgaggtcaggagatcgagaccatcctggctaacacggtgaaaccccatctctactaaagctacaaaaaattagccaggcgtggtggtgggcacctgtagtcccagctattcaggaggctgaggcaggagaatggcatgaacccgggaggcggagcttgcagtgagccgagatcgtgccactgcactccagcttgggcgagagagcaagactccgtctcaaaaaaataaaaaaaaaaaaaaagaaaaccaaggtctctttgctctccaggacgcagtgagggaatgatgccacccttacccaaggaggcagtgagggaatgacgccatccttacccaaggaggcagtgagggaatgacgccacccttacccaaggaggcagtgagggaatgacgccacccttacccaaggaggcagtgagggaatgacgccacccttacccaaggaggcagtgagggaatgacgccacccttacccaaggaggcagtgagggaatgacgccacccttacccaaggaggcagtgagggaatgacaccacccttacccaaggaggcaaggttcctgcaggtctccagcatcacatctctgtagaggctcctctgagcatgatccagcaatgcccactcttctggggtgaagttcacagccacttcctcaaagatcacgcagtcctaaaacattccacacatcccacttcagcaaaggcaccgcctcccccatgtgcgcaggaagaggggtgaggctgacagcctggggaactgagccacacagagcttatgtccttgtgagaggtgaccaacagtatgaaaaagtgcagtacactcaatgccgtgagtaccttcccaacagggagcaaagcgcaatgacggcctctgccagagacttacaaagaattactgagaaacggcaggtatgagggtggggaaacactgaaaaatctgaaaacatcattaagctaaggctggtggctcatgcctgcaatcccagtactttgagaggctcaggtgcgaggattgcttagggccaggagttggcgaccagcctgggctgcatagtgagatcccgtctctacaaaaaaaataaaatacaataaattaaccagccatggtggtacacacctgtagtcccggctacttaggagggtgaggagggacaatcgcttgagctcgggggttcaaggctgcagtgaactatgactgtgccactgcactcctgtctgggccacagagtgagacccaatctcaaaaaaataaaataaatcaatcattcaggtaacatggaaattgacatgacttgctcaaattttattatttcttattcagctataatatcagcactttgggaggccaaggtgagaagatcgcttgaggccaggagttcaagacgagcctgggtgacagagcaaagaccctgtctcttaaaaaaaaaaattaaattaaattaaattttaaaaatacaactatgaagaaaagcaaggagattatttccttataatttaggatattggccaggtgtggtggttcacgcctgtagttccaacactttgggaggccaagacaggcagatcacttgagttcaggagttcgagatcaccctggacaacacagtgaaaccctgtctctaccaaaaaaaaaaaggctaaaagaatttaggataggccgggcgtggtggctcacgcctataatcctagcattttgggaggctaaggtgggcggatcacaaggttaagagatcaagaccatcctggccaacatggtgaaaccccatctctactaaaaatacaaaaattagctgggcgtggtggcacacgcctgtagtctcagctactcaggaggctgaggcaggagaatcacttgaacccaggaggcagaggttgcagtgagccgagatggcgccattgcactccagtctagcaacagagtgagtctccatcacaaaaaagaaaaaaaaaaaaaaaaaaagaatgtagaatactggcctgatctggagggagaagcctaccattacacatcatttcaaattggatgccaaggcttcttcgaagacatggcctggctgtcgttacacactgttcacttgaggacgtttccactgactctgtaattgtcttacaaaagttctacatgtgttcaattttataataaaatgctatcagcagctgggcttggtggctcaggcctatactcccagcactttgggagactgaggtgggaggactgtttgagcccagaagcttgggaccagcctgagcaatatggtgaaaccctgtctctacaaaaaatacaaaaattagccaggcatggtggggcacacctggagtcccagctactcaggaggctgaggtgggaggatcatttgagcccaggaggttgaggctgtagtgagccacgatgtcaccactgcactccagcgtgggtgacagagagacgccctacctcaaaaaaaaaaaaaaaaaaaaaggctgggtgaggtggctcacacctgtaatctcagcactttgggaggccaaggcgggaggatcacttgaggtcaggagttcatgagcagcctggccaacatggtgaaaccgcaccgctactaaaaatacaaaaattagccaggtgtggtggtgcatgcctgtaatcccagctacttgggaggctgaggcaggaaaatcacttaaacccagaggcagaggttgcagtgagctgagatcaagccactgcactctagcctgggtgacagagtgagactgtctcaaaaaaaaaataaaaataagtaagaacacagccaaatcaccactttcagcccgtgttaaaggacaaaggggtgagtggtggattctagaagatctagaagtttttctgtcccacaaagggtcccatgcagaaaacaggtatcagttaatgattagggtctcatgcagaaaacaggtatcagttaatgattatcctcatgataaattgttcgtcagtcccctaatcggaattgccgcttctctgtactgtgggtcgtatattacagaatgcgcatctgtctgatgcgcagatactaacaggagacggagcagggtcccccactgtcacaaactctgcaccctgcctaagtcagtgctagtttcatgaatgttttcaatccacaccttcgcccacctcacaatatggcatggggctgtgtgtgcgcctttcccctcatcctaatggaagatgcaacgtcttccgagtttgagagttttccacagcagccttctcgggctaagccatggtataacaccaggcagtggcagaaggcaaagaacacatccaagacaatgactgccctcactaaggacaagaaaaaaaaggcaaaaagcatttattcttttttttttttttgagacagggtcttgctccgtctcccaggctggagtgcagtgaaacaatctcagctcgctgcaacctccgcctccccggttcaagcgattctcctgcctcagactcccaagtagctgggattgcaggcacttgccatcacacctggctaattttgatatttttagtagagacggggtttccccatgtcaatcagggtggtcttgaattcctgaccttgtgatccgcccacctcagccactcaaagtgctaggattacaggtgtgagccaccgcgcccggctctttttttttttttttttttttccagacagggtctagctctgttgcccaggctggagtggagtggtacagcctcaaactcgtgggctcaagcgattctcccccctcagcctctcaagtggctgggaccacaggtgcgcatccccatgcccggcctcattattttacatttactaaaacctggggctgaaataggaacaataccaatgctgagctggacacagacgaggctgttcgcagctgtcaggtgacaatgttgaactgacttcagctctgtgctcctggaaaccagcaaaggtgaaaccccgtcctgctgtgctctggaattgggacagccaggaccctcccttcccatacgacttagataagattcacgcagatgacaaggccagattcagaccctccgaaatcccattctttgtcatcagaaatgattcactaggttaggtgtgcccaggctggagtgcagtggtgtgatcatggctcactgcaacctctgcctcccgagttcaagcaattctccctgcctcagccttccaagtagctgggattacaggcacacactaccacgcccggctaatttttgtattttttagtagagatgggatttcaccatgttggccaggctggtcttgaactcctgacctcaggtgatccacctgcctcagcctcccaaagtgctgggagtacaggcatgagccaccgcgccaggcctagccaactcttcagatgcctgcatacttgacggtcacagagctctccccctgcagctgtctccctgtggctacagcattagtcccgcagctcaatcatcaactgtccccatgcccctgttgcttatacccccaccccactgcaatagaacctcaagcctctggcattactctcctgcctctaatccaactaacccttctccctattgcaacagccccttctccccctcccccaatacctcgcaataatcctttttcataaaagtttccttactacgtttgggtttacacaagcttgaccacatgttcgcagcctcccgtttcttccccaaactttactcagccttctgtcctctccgcaggcccctgaactttggcccccccgagtctgagcaagcagtaagtgtggagtcccctgtcacctcccctgagctagctgaccacgaggaggtacatttactgtcaacctcctttctgcttgtcccctaaaacgttcctccaaaccttttcttgtgtatgaaagtaaagccttttcctggttgattttgagacctggcaggtttcggaggctggggcttatccctatttttctctctccttctctagccaggatttttttttttttttttttttttggtttttgtttttgagacggagtctttctctgtcgccaggctggagtgcagcggcgccatgtcggctcactgcaagctccacctcccaggttcacgccattctcctgtctcagcctccctggtagctgggattgcaggcgcccgccaccacgccgggctaatttttgtatttttagtagagacgggatttcgccatgttgtccaggctggtctggaactcctgacctcaggtgatccgcccgcctcggcctcccaaagtgctgggattacaggcgtgagccaccgcgcccggcccaggattttattatttgacaggctccaggacagggcaccacctcctccttggcagaccttcccaaactgaccaccaagcccctgacggctcctgccctctcctcccactctccccgatcccctgactgcctctactgtcccccaacacatccctcgagcccgactccctttactgtccccccaaacttccctcaagcccctgatcgcctctactgccccccttaaagtgcccctgagcccctgactgcttctgctgtcccctcgagctgcccccaaactcccgactgcagctactgtccccctaaactgccttcgagcccctgatcacctgtcccccaaaactgccccttcaaacccatgaccgcctctacggccccctcaaactgtccccgagttcctgaccgctgctattggccccctaatctgcccttgagcctgactcccttccactgaacccccaaactgccgccgagcccctgaccgtgtctgttcccgcaaactgcccctgtgccccttaaacctctactgtccacttaaattgcctcaagcccctgaccacctctgctgtccccacaagctctccccaaactcctgacctgtactgtccccagaaactacccctcgagcccctgaccgcttttgctgtcaccccagactgcccccagccctacccctcggccgctgtgaccacgtccccggggcccaggcgctcgtcgtgcgccgccccgcgcgtccctcagctttctccggctgcgaactcgggcggaagccggttcctgccgccccacctcgccctgggcccgggctcggctcccgcccggcactcaccatgtcccgcccgctcctgggctctccagggttagcgccccgcggtccagcgaccggcgcaggtgagcacgacaggacacctgagccgctcggggtaggcggggaagcgcgcaaggcagaggggaactcggcttaccgtcctcggggtctgattggacagatctcgggaagtggagactctgattggacagtgctgtcgactccgcacccctgattggagaattctccagtccgtccccctagcgcccttgattgggcagggctccgcttcggattaacgtctctgattggacagttccctaggccccgcccctgcctgtcctgattggataattctctcctcagtgacgggctcgtcgagaacacgcgtggctgaccctctagccgggcagccgcggatctgggagaactcactccagtccagggagggcgcggcgtcctcctccctgactgcacggcaactccagactcagtttcccctcggagcggcccctcgtgcggggaggagaggaagggcacggagtcccatggggcggagtcctgcgtgggggcgggacccgcgtgcgtgacgtcaccgtgctgtcccgcgtgggcgcggacgcctggggtccagagacctggagatctggagaccagacgacgaggccccaggaggccggaccccaccaggcgctccctgtgttcttaaaactctcggccgggcgcggtggttcacgccggtaatcccagcaccgtgagaggcggagaccggcggatcatcagaggtcaggagttcaagtccagcctgaccaaaatggcgaaaaccacttctctcctaaaaatacaaaaattagctgggcacggtggcgggcgcctgtaatcccagctactccggaggctgaggcaggagaatcgcttgaacccaggaggcggagattgcagtgagccaagatcaggacactgcactccagcctgggcaacaagagcgaaactgagtctcaaaaaaaaaaaaagcagccctcccacaaacagaaccacgtaaggtcatgaagagagaggtctcacatttatatgcttaataacgaaaaagactctacaaaaaccacaggcttaaacaaaaaatacttttacagggacactcagactggtgtgacccttgttactgatctttgtagacaaggataattatttctgaaaaatgatgtaatcctcatttaaaattttttttttcctttataaacctttgtcccagtctgggcaacatggcaaaaccccatatatacaaaaaatacaaaaattagctgggaataaaggagtgtgcgcctatggtcccaacgacttgataggctgaagcaggaggatcgctcgagcccgtggggattgaggctgcagtgagctgtgatctcaccattgtactccagcctgggcaacagagacccccgtctcaaaaaaatgaaaaccaaaaacaacctttgtcttcctttacctccctgaataagcacatagtttgctatgccgcgcatattcccactgcaatgaactgttaccaccgtttttagacagcctgttatttaggtcgacacagtaaaaacatgaattacgacaattatgtttgtatgtaaaatggcaagcgatatagagtttatacttctactctgtctcaagctggaaagtcttttcggagatgagcagtcgcgttccaggctttaggaattgcggctcaactgaataaaagtattcagaattttcacgtcgagttcaaatttatttaaacttctatgattattttctcaaatgagttaaaataagaattcaattaccataggaacagtacagccttttactttaagaaattctctagggccgggcgcagtggctcacgcctataatcccagcactttgggaggctgaggcaggtggatcacctgaggtcaagagttcgagaccagcctggccaacatggcaaaacccttgtctctactaaaaatataaaaattagccgggcgtggtggcacatgcctgtaatcccaactacttgggaggctgaggcaggagaatcactagagcccgggaggcggggattgcagacccaagatcgcaccactgcactccgcctgggtgacagagcgagactccatctcaaaacaaaaacaaacaaaaaaacgccatttgaacgacacgttttgtttccccccgctttattatttttaaaaagtaccatggtgtacacattgcattacaattgtttttgtggctcaatgaaaaaaataaatcctccacctctcttcatcttaataggtgacttccttactccttacagatgtaagatgatgtaagctgatgtaacaaggtctctctaaatagacagtggacttgtttccaatcttttgctactcaaagcttgtcttatgttgcaccaccatgcctggcagatttttgtattttttggtagagatggggtttcaccatgctggccaagttggtctggaactcctgacctcaagtgatccgcttgcctcagccttcatcaatggatattaatgaagcttaggatactcacattgtgtcaaagataagaggcaaggaaactacaaagaaattggaagtgataggaaacagtggaataactgtcagagaggaagcagtgggaacaaaagacaggaaagaaaaacatgcctattatcagagtccctgaagaagtaaacagtagcacagcttttcaccttacatcattaagaaacacataaataggccgggcgcggtggctcacgcctgtaatcccagcactttgggatgccaaggtgggcagatcacctgaggtccaaagtccgagaccaccctgacaaacatggagaaaccccatctctactaaaaatacaaaaatgagctggacatggtggcaaatgcctggaacccccgctaatcgggaggctgaggcaggagaatcacttgaacccaggaggtggaggttgcagtgagccgagatcatgccactgcactccagcctgggcaacaagatcaaaactctgtctcaaaaaaaaaaaaaaaaaaaggaaaagaaacacataaatactataataaatgtagcaacgtaccttgcagaagatccaaaggttgcttgtggaattgggcaagggaatctaaatttccagagttagtatgcagtggtggagagagggttgtcggaaatctaatgttaagttttaaagcagaggaaacagtgtgacttggtatttgaggtgtgtgcgcgcattttctgttttcctaccagactcttcagttatgtgcaatttcttctgttcacttagtgtttcttagggttgaaactgaacataaacaaatatgaaattcgtgttatactcacattactcaacatatcaggtaatttgtgaagacagagatgtttcctgatcaattgttctagccgactgacagccaatatctacatagaattatttcaaagtcgcagggtgcggtggctcacgtctgtaatcccagcactttgggaggccgagttgggcggatcacaaggtcaggagatcaagaccatcctggctaacatggtgaaaccccgtctctactaaaaatacaaaaaatcagctgggcgtggtggcgagtgcctgtagtcccagctactcggaaggctgaggcaggagaatggcgtgaacccaggaggcggagcttgcgttgagctgagatcacgccattgtactctatcctgggcaacagagcaaaactctgtctcaaaaaaaaaaaaaaaaaaagaattatttcaaagtcaattgagtggctgggggcagtggcttacgcctgtaatcccagcactttgggaggccgaggcaggcgggtcacgaggtcaggagttcaagagtagcctggccaagatggtgaaaccccatctctactaaaaatacaaaaattagctgggtgtggtggcgggcacctgtagtcccagctactcgggagggtgaggcaggagaatcacttgaacccgggaggtggaggctgcagtgagccgagatcacaccactgcactccagcctgggcgacagctcgagactccgtctcaaaaaaaaaaaaaaaagtaaattgaggacactgtaacactctgctcttaaacacctcccaaatgctattttagagaaaaatctgtatttttatctaaaagtccacacttcatattcgcactttagatagttaacaatcattcctttatacctagcccataatcgtatttccttcaattataccccaaatggtctttacagctggtcctccgaagatccaaccccaaaccaggtattgcatcttcttttattttatagtattatatggtcatgttgaatttttcttttgaggtgtagtctatgaatttttgtgtatgtatagcgttaacgggtgaattgcgtccccacaaatccgtaaggtgaaggcctaacccacagtacctcagaaggtatttgaagataggcctttaaagaggcaattcgattaaaatgagattaaggtgggctcaaatccaaaagactggcgtgctattcattgcagggtgttgagcagcaccctagacctcctcatccactggatgccagtcgccccaaccccatccccggttgtgacaaccaagtctgcagacattgtccagtgtcccctgggcgtaaaatttctcctcccctctttgataatcactgctttagactctatttggtcttagagtcttttctctgaagtccatcattttatccgccgtaaccctgctgtcttcacttaaggggtccaagacgtttacaggagggtgataatggtgatgatgagctgccaataataatccacacacagcactatttgacaaatgcaggtaatgttatgtattttacagacctggaaactgaggcacttaggggcttggcaacttgcctaatatcacccgagagctgattaaggcttggggccaggactgggaccccaggatgaagcccagctgagcagaaaacctctgtgcacaggatgcagcaatcaagataataaaaatcaactccgactgagaaagtatctgcctacacattcatcaggctgggaggacagacccagatggtatcagttggaaaattaacagaaaacagtatttttgccaaggacacctttttctgagccatcaatgtcttctagctcgctaaatgccttccttgcccattacaatcatacacagtgattgacattttatcagtaagaataaacttcccttttccggccggagggtctgattttcttggacacagagaatccgtctccatttccaacccaggtgcagggctctgataagcggtttccggacataacaatctacagcggtcttatcttgtggttcccaaggaaacaggtcccggctgcacttcgcagcccagacccgagggtgacccctttacaagcttgctctttgccaaatggaaaccacgcagtatttacatttcacctaaaccccacccttccctccaaatccgatgggttactcaggcctaggatcctcaggcctagggggtcaaaacgccccgcgtccccaaccaagacccctgaagtctagcggggttccactggcctccggagcctcctccctggggcgcggtgccaggacttcgccattaaacgagcccgccccctgcactttgaactctgcccccatcctttgacccaaacccccctacgccccggcatcggagtccccttgcttggcctctgccacgaagatacggggccaggtccagcagtacaaggaggagaaaccgctctcacgggaggcgctgcggccactgagggagacggccgccgcgggtcacagacggatgcttccgtttccggttccggggcggctgggagctgaaaagtgggctagtaatgagcttgggattggtggagcctcaaagataggcgggacgacctacgtcgtccaatcgctgagcaggaaaagctagtttccgccgtctgggagataattggcattgttggcagatccgcccctcgagggcaagtctcgggacagaatcgcgctgtgggcgtggcttgtactggatcctccccggggcgtggctaaaacaagaccgaggtcccgggacgaggttgggggcgtggtctttcgcgcaatcctccaacgcccaattaccctgataaacaataaacgctaaaataagtaataaatgctcatttcctccagccaacacattcctcgtgataacatactcctgcacaaagatattcccattgttgggatttttcttccttgaatgtctgttatttcttccagaaataaggtcatttttatgcatttacatgtggcttttcttattaatgagtgcgttgtgatgttcccttctggccactagatggccacgtagctcacattttcaaattcgcggatattttgttttagttgctttagacataggtgtccaatcttttggcttcactgggacacattggaataattgtcttgggccacacataaaatacaggaacactaactatagctgatgagctaaaacaagacaaaaattgcaaaataatctcataatgttttttttttctttttttttttttttttttgagacggagtctcgctctgtcgcccaggctggagtgcagtggcgcgatctcggctcactgcaagctccgcctcccgggttcaagccattctcctgcctcagcctcccgagtagctgggattacaggcgcccgccaccaagcccggctaattttttgtatttttagtagagacggggtttcaccgtgttagccaggatggtctcgatctcctgacctcgtgatccgactgcctcggcctcccaagtgctgggattacaggcgtaagccaccactcccagccaataatctcataatgttttaagaaagtttacgaatttgtgttgggtgcattcaaagccatcctgggcttcatccggcctgcaggccctgagttggagaacttagctttagagtttagacacaggaaaaatgcaggggtctttgccttccattgtgaggcatcataactaagattaggaggccatcctgacttgtccccttgtgtgacacccagcgggctccgcatcccttgcattcccatgcctgagcacctatctcttttacaaggtaagcagtcctgaaggataccagcagaccgccagatgggttacaaattcctcatatccggtactgccagcgaaagagaacaaaagtcccttattcctgaatcggcttcatcagcttccccaatctccagccaatcaacaccaaaaagcccaagaagctattagctacaaattcctgcctaaggccgggtgtggtggctcacacctgtaatcccagcactttgggaggctgaggcgggtggatccatctaaggtcggaagttcaagaccagcctgaccaacacggtgaaaccctgtctctactaaaaatacaaaacttagctgggcttggtggcacatgcctgtaatcccagctacttgggaggctgaggcaggagaatcgcttgaacccaggaggtggagttgccgtgagccgagatcgtgccattgcactccagcctgggcaacaagagtgaaactccatctcaaaaaaaaaaaaaaaaaaattcctgccttaaaaggggccagggacttcttccaggccccacatgtgcagctagagttaaggtttagctaatagtaaacttttcctcattttattttatttttttgagatggaatcccactctgttgccaacgctggagtacagtggaacaatcaagactcactgcagcctccaagtcctgggtccaagcgattctcctgcctcaaactcctaagtagctgggactaccagcacttgccaacacacctgcctaatttttgtatttttagtagagacggggtttcaccacgttggccaggctggtctcaaacacctgacctcaggtgatctgcccgcctcagcctcccaaagtgtcgggattactttgggattactgtggcgtgagccacagcgccgggccaacattttcctcattttaatagttaaaaaaaaaaaacctgaggctgaggcaggagaaatgcttgagcccgggaggcggaggttgctgtgagccgagatcgtgccactgcactccatcctgtgtgacagagtaagactctcgaaaacaaaaacaaaaacgaaaacaaaacccacccctaggtggagattttgtatgctattgatacatgcaatgtgtgttagagcaggcagatgctgagtccaaccgtaggtccacctttgcacacctgacctcaccggtattttctgactatgtacgtacagcccccaaaaaggaatttatcttaaggcactagctgctgcctctccctgtgaatagtctgctctgcctcttagagagtactttcattttgcaataaatttctttgcttactcacactttggacttgctctcaaattatttgtgcagtgaagccaagaacctgcccagcccaccagcaacagttgtagctgccggacaggttctccctgctcactgcacaaacaaaatcgattcacaaagaccgtggcattgcagtaaaaagagtttagttggcctgaggctggctatgccatgcaggaaacggagtcattactcaaaccaagctccctgaaggctctgtcgcccaggatggagtgtagtgacatgatctcagctcactgcaacctccgcctcccaagttcaggtgattctcctgcctcagcctcctgagtagctgggattagaggcacccgccaccacgcccggctaatttttgtacttttagtagagatgggtttttgccacattggccaagctggtcttgaactcctgacttcaagggatccaccagccttggcctcccaaagtgctgggattacagacgtgagccactgcacccactcaggggttttttgaagatagtttggtggtcaggaggctagggtctaggtgctgctggctagttggggatgggatcatagggatgtggaacacggccctcatgccgtgagtccacttctgggtggaggccacaggatgggccaggggtgtccatctggttgtcagaaatgcaaaagcctggccaggcgcggtggctcacacttgtaatcccagcactttgggaggccgaggcaggaggatcacttgaggccaggagttcgagagcagcctggccaacatggtaaaactccgtctccactaaaaatacaaaaaaaatagctgggcatggtcgtgcatgcctgtaatcccagctactcgggaggctgtggcaggagaatcgcttgaacccggggggcagaggttgcagtgagccgagatcacgtcactgcactccatcctgtgggcaacagagcgagactccggctcaaacaaacaaacaaacaaaaaaaccagagcgactccatcttgaataggggctgggtaaaatgaggctgagacctgctgggccacattcccaggaggtcaggcattcttactcacaggaggagataggaggttggcaggacagtatcacaggacacaggtcacgaagaccctgctgttagaacagaacatggtaaagaagccgccaaatctcaccaaaaccaagatggcgaagaaagtgacctctggttgtcctcattgctcattatatgctaattataatgtattagcatgctaagagacactctcaccagtgccatgaccgttcacaaatgccatggcaatgtccggaagttaccttatatggtctgaaaaggggaggaggctgaggcgggcggatcacctgaggtcgggagttcgagaccagcctgatcaacacggagaaaccccgtctctactaaaaatgcaaaattagccgggcgtgatggcacatgcctgtaatcccagctactcgggaggctgaggcagcagaatcacttgaacctgggaggcggaggttgcagtgagccaagatcgcaccattgcactccagcccaggcaacaagagtgaaactctatctcaaaaaaaaaaaaaaaaaaaaaaaaaaaaagacgtgtgtgtgtgcacacagaaatgtgtgcctattgtctaataaatactcataaagcatcttctatgtcccagactctgttttctgcactgggaaacacagcagtaaacatcacacatatccttctctatatcctttagattccaatagggaaggacagaaagttaaccatgttgataaatagcatgttaatagatatatcccagccgggcacggtgggtcatgcctgtaatcccagcactttgggaggccaaggagggcagatcacctaaggtcaggagttcgaaaccagcctggccaacatggtgaaacaccatctctactaaaaaaaaaaaaaaaaaaaaaatagccaggcaaggtgtcgcatgcctgtaatcccagctactcaggaggctgaaacaggagagttgcttgaactcaggaggtgcaggttgcagtgagagaagatcgtgccactgaactccagcctgggcaacagaacaagactccatccccccataaaaaaagaaaaaatatttgtgaaatgtatacacgcagttgtccctcaatgtctgcaggagattgcaagatccctgcaggtatcaaagtcagtggatgctcaagaccctgatataaaatggtgcagtaaccagacgcggtggctcacgcctatattcctagctctttgggaggccaaggtgggaggattgcttgagctcaggagtttgagaccagcttgtccaacatagtgagacctcatctctacaaaaaatacaaatattaactgggtgtggtagctggggcctgtggtactagctacttgggaggctgaggtgagaggatcacttaagcctgggaggccaaggctgcagtgagctgagatcacaccattgcctcctaccctgggggacagagtgacagcctgtctcaaaaaaataaaataaaaaggcgtggccgggtgcggtggctcatgcctgtaatcccggcactttgggaggccaaggcaggtggatcacctgaggtcaggagttcgagaccagcctggccaacatggtgaaaccccgtctccactaaaaatacaaaaatcagctgggcatggtggcaggcacctgtaatcccagctactcgggaggctgaggcaggagaatcacttgaacccaggaggcagaggttgcagtgagctgaaatcatgccgttgcacttcagcctgggcgacaagagcaagactccgtcttaaacaaaataaataaattaattaaaataaaataaaatggtgccgtatttgtgtaaaacctccacacaccctcccatatactgtagatcagttctaagttgcttataataactagtgcaacatcaacgctatgtaaatagttgttatactgtattttaaactttgcattatttttcttcttgtattgttaattttattgtttttattaaaatgctttcttcttcttttctctccattttttttttaaatgttttgttttgagacagggtcttgccctgtcacccaggctggagtgcagtggtgggatggcggttcaccgcagcctcgaactcctgggctcaagcaatcctcctgcctcagcctccagagtagctgggaccgcaggtgcagccaccacgcctggcttcaaatattttcgattctgctgaatccacgggtatggaaccagcaaatacagaattcgaggacaagaaacccgcagataacgagaatcaattatactaattgtatctagaatatataatgacgtcaatggaaaaattgcatgaccaccagagggcacacttttacacccaaaacgtcccactttgctgtttgtttttttgtgggttttgttttgttttgttttgttttgttttgttttgttttgtttgagacggagtttcgctcttgttgcccaggctggagtgcaatggtgtgatcgatctgatctcggctcaccgcagcttctgtctcccgggttcaagcaattctcctgcctcagcctcccaagtagctgggattacaggcatgcgccaccacgcctggctaattttgtattttagcagagacggggtttctccatgttggtcaggctggtctcgaactctcaacctcaggtgatccgcccgcctcggcctcctaaagtgctgggattacaggtgtgagccaccgcacccagcccaccactttgctgttctttggaaatgttcacagaaggcaaacaatgctgtttgctctgagttaagggggagaatatgcatatattaaatacgcatgtccatacacacacagagaaggataaagcaacagaaggcacaaaaatagcatgggggaagcgcggggaaagatgcgttcaggggttcttggtactattcttccaacttttctgtaagtttgaagttatatcaaagtaaaaagttgggctgggtgcagtaggtcacacctgtaatgccagtactttgggaggctggggcaggaggatcgattgagcccaggagtttgagatctgcctgggcaacatagccagaccccatctctacaaaaaaatatgaaaattagcaagtgtggcagcagtacctgcagcctcatagctcactaaagccttgacctcatgggctcaagtgatcctcctacctcagcctcctgagaagttgggactacaggcacacgccatcacacccagctaatttttctttttattcttttcttttcttttcttttttgtgagatggagtcttgctctgtcgcccaggctggagtgcagtggcgtgatcttggcttactgcaacctccgcctcccaggttcaagcagttctctgcctcagcctcctgagtagctgggattgcaggcacgtgccaccacgctcagctaatttttgtatttttagtagagacggggtttcaccatcttggccaggctggtcttgaactcctgacctcctgatccacccgcctcggcttcccaaagtattgggattacaggtgtgagccacggtgcccagccacgcctggctaatttttcaattttcttacatgttgtccaggctggtctcaaactcttggtctcaagtgatcctcctgccttggcctcccaaagtgccaggtgcaggaaccactgcgcctcgccctttcaggaatttgagaatagtctgttggcagttgaagacgggtcatccaaaacaaagttgctaacctgaatcacccagaagctctttgctttttgtatttaatcctggatgttattcttaaatttatcgtggtaaaagcattgtaattggacaatgacagggaaaattcattcatttagctccaaatgaccattgcttgcaatctgcagacaatgtatccgtttatttttcttttctggtttctaacgctattggtattctcatcataacatggttttcttacatttctattagcttgtctctttttttcactgaaattgttattgagataattgtagaatcatatgcagttctaagaaataacacagacattggccgggcacggtggctcactcctgtaatctcagcactttggggagctgaggcaggtggatcacctgaggtcaggagtttgagagcagcctggccaacatggcaaaaccctgtctctacaaaaaatacaaaaaaaaaaaaaaaattagccaggcgtggtggcgggcgcctgtaatgccagctactcaggaggctgaggcaggagaattgcttgaacctgggaggcgaagtttgcagtgagcagagatcatgccactacactccagcctggaggacagagcgagactcagtctcaaataataataataataaataataatgataaaaatacagacagatcttttcttttttttttttgaaacagagtcttgctgtacagacatcttttctatacttggcctagattcctccaatggtgacatttggaaaactaaagtacattaccacatccctgatattgacgctgttaaaatctatccatcttcttcccatggccccattttacttgtgtgtgtgtgtgtgtgtgtgtgtgtgtctgtgtgtgtgtgtgtgaagttaacctgggtaagtctgtgtatccatcacagtcaaggtacagaactttgtccgcaccacaaggatgtccccttggatccttctacaatcacacccacctccctctaacgctcccatcccccaaacccatcaggaagctccctaaaaagatgttagtctcctagggatcccccaggttctactccccagtctgctgagctagaagcccaacgctggggtcagaaatccgcatacttaataagatgcccaactgactccagggctgaagataggattggtgcaaaaattgagcccggctgggtgcagtggttcatgcctataatctcagcactttggaaggctgaggtgggaggatctcttgagcccagaaggcggaggtcgcagtgagttatgattgcaccactgcactccagcctccacaacacagcaacagagcaagatcctgtgtcaaaaaaaaaaggaagaaaagaaaaaagaaagaaggaaggaaggaaaaagaaataaaagaaagaaagaaggaaaggaaggaaggaaggaagggagggagggagggagggaggcaggcaggcaggcaggcaggcaagcaagcaagcaagcaggccagacgcgataactcacacctgtaatcccagcactttcggaggccgaggcagacggatcacctgaggtcaggagttcaagaccagcctggccaacatggtgaaacccatctctactaaaaatacaaaaattagctgggtgtggtggcgagtgcctgtaatcccagctactcagggggctgaggcaggagaatcacttgatcccaggaggcagaggttgcagtgagctgagatagtgccactgcactccagcctgggtgacaagagcgagactctgtagaaagaaagaaaggaaaagaaaagatcccaagggcccttcaaaagccattccaaagatttcagttttgcctctgagtgagtggggccataggatgagtatcagcagaggagggacgggatcttacctaactttttttttgagtctctacaaaaaatacaaaaattaggggagcatggtggtacacacctgttgttccagctacttgggcagggctgaggcaggaggactgcttgaacctgggaggttgaggctgcagtgagctatgatcgtgccactgcactccagcctgggcaacagagcaagaccctgtctcaaataagaagacagagagcgggcagcgagatggggggcagggtgggggtgtagcaaagctccgtcctctattattgcatggaatcaaaaatcaccattgcaaatccaaaaatagaacgctgagctttagtttttttttttttttttttttttttttttttagacaaggtctcgctctgtaacccaggctggagtgcagtgacacaatcttggctcactgcaacctcagcctcccagtttcaagagattgtcctgcctcagcctgttgactacctgggattacaggcatgcgcgaccatgcccggctaatttttgttttgtttcgttttgagatggagtcttgctcttgtcacccaagttggaatgcagtggcacgatctcggctcactgcaacctccgactcccgggttcaagcaattttcctgcctcagcctcccgagtagctgggattagaggtgcgcgccatcactcccggctaatttttttatttttagtagagacggggtttcgccatgttggccaggctggtctcgaactcctgacctcagatgatccgcctgcctccgcctcccaaagtgctgggattacaggcgtgagccaccgtgcccggccctaatttttatatttttagtaaaggtgggtttcaccgtgttggccaggctgatcaccatgttggccactcctgggctcaagtgatcctcctgcctcagccacccaaagtgctgggattacaggcgagagtcaccgtgcccggcctgagctttagtattgagagtagcagttcttggccgggcgcggtggctcacgcctgtaatcccagcactttgggtggctgaggcgggcggatcatgagctcaggagatctagaccatcctggctaacacggtgaaaccccgtctctactaaaaacataaaaaaattagccgagcctggtggcgggcgcctgtagtcccagctacttgggaggctgaggcaggagaatggcgtgaacccgggaggcggagcttgcagtgagccgagatcgcgccactgcactccagcctgggagacagcgagactccgtctcaaaaaaaaaaaaaaaaagagagtagcggttctcaaaccgtggttccctgagtggcggcagcagcattgtcacctgggagcttgctaggaatgcacgttttcaggccccaggcccagatttgctgcctgaaaaagtcttaggttgggggtccacaatctgagttttaacaccccccgccccaggtaattgtgatgcacactcaaatttaagaaccactgacttaaagatatgaaagtctttgggaggctgaggtgggaggatcgcttgaggccaggagttcaaggccactctgagcaacacagcgagaccccatctttgcaaaaagagaaacaaaaacagaagaggccggccgtggtggctcatgcctgtcatcccagcactttgggaggccgagacgggcggatcaggagttcgagaccagcctgaccaacatggtgaaaccctgtctctactaaaaatacaaaaattatccgggcatggtggcgcctgtctgtaatcccagctgctcaggaggctgaggcaggagaattacttgaacccgggatgcggaggttgcagtgagccaagatcgcaccactgcactccagcctgggcgacagagcgagacttcgtctgaaaacaacaacaaacagacaagaggaacattcttctgatgagggaaatttccttctttctttctttctttttttgatacggattctgtcgcccaggctggagtgcagtggcgccatctcagctcattgcaagctccgcctcctgggttcacgccattctcctgccccagcctcccgagtagctgggactacaggcgcccgccaccacacccggcttatttttttgtatttttagtagagacgggggtttcaccctgttagccgggatggccttgatctcctgacctcgtgatccgcccgcctcgatctcccaaagtgctgagattccaggcgtgagccaccacacccggcctagtgatggaaattttctaaaattggattgtggttatggttgtgcagttggacacatttgctaaaagtcattgaacaatatgctttaaatgtatgacgtcatcttatgtaaattacgtcaacgaagcgctcatataacatttgacctgtagggggtagcagagaccataagttcaattcagaacagcccctccctgccttgagagtctcaatgggatgaacccatccctttcacttaggagtcctgattggaatgaagaattgggcagctgggaatttcccctcaatagcctaaaatgccttgtttaactaactgtggccacactcagttctaaatttataccaattagctgggggagttgagtctcttgaccacggaaccaggagaagccacatcccctctccaagcccggaagagatggttctcttcttttttttttttttttttaaatggagtctcactccatcgcccaggttggagtacagtggcatgatctcggctcactgcagcctccgcctcctgggttcaagaaattctcctgtctcagcctcccgagtggctgggactacaggtgcccaccaccacgcccagctaatttttgtatttttagtagagacagggtttcaccttgttggtcaggctgggcttgaattcctgaccttaggtgatccacccgcctcagcctcccaaagtgctgggatgacaggcgtgagccaccgcgcctggccttctttttttttttttttttttgagacagagtctccctctgtcacccaggctggagtgtggtggtgcaatcttggctcactgcaacctccaccttccaagtccaagcgattctcctgcctcagcctcccaaggagcttggattactgacatgcaccaccatgcctggctcatttttgtatttttagtagagatggggtttcaccatgttggccaggctggtctcgaaattccgacctcaggtgatttgcaagcgtcagcctcccaaagtgctgggattacaggcttgagccactgcacctggcccgaggggatggttcttaaagggtaaaatgtaaactacgatccacagcttgaccttcaaaagactccaatcctttactttctttttttgttttttatttatttattttttgtagagatgggatcttgctatgttgcccagctggtctcgaactcctaggctcaagcaagcctcctgccacagcctccagagtagctgggactgagggtgtgagctaccataactggccttgatgggaaccagtgtccagaggaagtgcagggccccatcaggcccaggcatgccataggggcaaagctagcgtggaccctcgcaactgagacatccaaggaaagcagacaccaaaaaacatgcatgtgggtgggttaaagtgctccccactctggccaggcacggtggctcactcctgtaatcccagcactttgggaggctgaggcgggtggatcacttgaggtcaggagttcaagcacaggctggccaacatggtgaaaccctgtctctactaaaaatacaaaaattagccgggcatggtggcgcgcacctgtaatcccagctactcaggaggctgaggcagggcaattgcttgaacctgggagacggagactgcagtgagccgagatcacgccactgaactccagcttgggcgacagagcgagactccatcttaaaaaaaaaaaaaagttctccccactcagtcatctccttctagcaataatttacagagcccgtccaggacagacaaggaagaatgaaacaaacaagaaaatatcacagggtggtgggacgattaggaaaactcgggaaagatggagtgatttaaatcagagaagtgtctgctgggtgcgatggttcacacctgtaatcccagcactttgggaggctgaggcagggggatcacctgaggtcaggagtttgagaccagcctggccaacatggcaaaaccccatctctactaaaaaaaaaagtagactgggcgtgatggctcatgcctgtaatcccagcacttagggaggccgaggcaggcggatcatgaggtcaggagatcgagaccatcctggctaacacggtgaaaccccgtctctactaaaaatacaaaaaaaaaaaaaaattagccgggcatggtggcaggtgcctgtagtcccagctacttgggaggctgaggcaggagaatggcgtgaatccaggaggcggagcttgcagtgagccgagattgcgccactgcactccagcctgggcgacagagcgagactccatctcaaaaacaaaactaaacaaaacaaaaattagctgggcatgatagtgcgcccctgtaatctcagctactcaggaggctgaggcaggataatcacttgaacccaggaggcagaggttgcagtgagccaagatcacaccactgcgctccagcctgggcaaaagagagagaccctgggtctcaaaataaataaataaataaataaataaatacaataagagaaacatcactgagaagagatttgttaattgaattctggatgacagagggtgttcgattgaagaggggataaagaaagactcaaacacccaggagttcgagaccagcttgtgcaatatagggagaccctgtctctgcaaaaacaaacaaaaattacctgggcgtggtggcaggggactgtagttccagttacgcaggaggctgaggccagaggatcgctcgggcctggaagtttgaggctgcagttagctgtgatcaccctactgcacttagcctgtgagtctcagtccctgtctcaaaaaaaaaaaaaaaaatagaggcttgaacatgaataattattcatcagtgaccctatgttgaaccaacaaagctgccccctgattctggaccatcagaaactgtgagataataaatgttgattgtttcaacaattcgtgtaaatggcccagcaagtttaggggcaatttgttacacagcaatagctaactaatgtctctggatttcttttgagaggaaagccaggtccaggagattcaaaacccacttcttttttttttttttttttttttgaggtggagtctcactctgtcacccgggctggagtacagtggtgggagctcggctcactgcagcctccgcctcccgggttcaagtgattctcctgcctcagcctcccgagtaggtgggattacaagtgcgcgccactacacccagctagttttttcatttttagtagagacgaggttccatcatgttgactcagctggtcttgaaatcctgacctcaggtgatccgcccacctcggcctcccaaagtgctgggattacaggcgtgagccaccgtgcctggccctcaaaacccacttttggagtggatgtggatgccccttcctccaagcttgggttcatgaggaggtccagtctaatgccactacctgagcagatcctaactggatctctctatgatggcgtaagggttatgggaatacctcctggagcaagactgcctgggataaaatcctagtttacttagcaactgtgtggtcctaagtaggtcacttagcttctctgggacttaatttcctcctatgtaaaatgggatttagtggttgatgaaaacattgagttgttatagttactcatatgaaagtcgtcagaatcaggctgggtgcggtggctcacacctgtcatcccagcactttgggaggtcgaggcgggtggatcatgaggtcaagagatcgagaccatcctaacacggtgaaacccgtctctattaaaaatacaaaaattagccaggtgtggtgaagtgcacccgtagtcccagctacttgcgaggctgaggcaggagaatcgcttgaacccggcaggcggaggttgcagtgagccgagatcatgccattgcactccagcctggaagacagagcgagactccgtatgaaagaaaaaaaaaaaaaagaaagttgtcagaatcaaaatggagtgacttgtgttaaaaaaaaaaaaaaaaaaaaaaaaaaaggccgggcgcggtggctcacgcctgtaatctcaacacattgggaggccgaggcaggcggatcacaaggtcaggagatcaagaccatcctggctaacacggtgaaaccccatctctactaaaaatacaaaaaattagccgggcgtggcagcgggcacctgttgtcccagctactggggggctgaggcaggagaatggtgtgaacccgggaggcggagcttgcagtgagccgagattgtgccactgcattccagctggggcgacgaaacgagactccgtctcaaaaaaaaaaaaaaaaagtgacgccaggtgcagtggctcatgcctgtaatcctagcacttcgggcggcagagattggcagattgcctgagctcaggagttcaagaccagcctgggcaacatggtgaaatccagtctctactaaactacaaaaaaaatcagctgggcgtggtgacgggtgtctataattccagctacacaggagactgaggcatgagaattacttgaacccaggaggcagaggttgcagtgatccgagatcgcgccactgtactccagcccgggtgacaaggtgaaactctgtctaaaaacaaaaaaacaacaacaacagcaaagtgacaaatagagccagggacagctttgaatagtgcgttctcatgcatggatgcctgataacaagaaaatatcacaaaagactgcatgccgggcacggggctcacacctgtaatcccagcactttgggaggccgagacaggaggatcacttgagcctaggagtttgaggccagccggagcaacacagccagactctgcctctacaaaacaataaaaaataaaaaatagccaggcgtggtggcacatgcctgtagtcccagctactcagaaggctaaggtgggaggatgacttaagcctcgtaggttgaggcaacagtgagccatgatggggccactgcactccaacctgagcaatagcatgagaccctgtctcaaaaaaataaaagaaaaaaataaaaggctgcaaaccccaaaaatttgcatcaaacttccttttttctttttgttttttgagatggagtctcgctctgtcacccaggctagagtgcagtggcgcaatcttggctcactgcaagctccgtctgccactctcctgcctcagcctcccgagtagctgggactacaggcacccgccaccatgccggctgattttttttttttttttggagatggagtctcgctctgttgcccaggctggagtgcagtggcaggatctcggctcactgcaagctctgcctcctgggttcacgccattctcctgcctcagcctcctgagtagttgggactacaggcgcccaccaccacgcccggctaattttttttgtatttttagtagagacagggtttcaccgtgttagccaggatggtctcgatctcctgacctcgtgatccgcccacctcggcctcccaaagtgctgtgattaaaggtgtgagccaccgcgcccagccctgattttttaaatttttagtagagacggggtttcactgtgttagccaggatggtctggatctcctgacctcgtgatccgcctgcctcagcctctcaaagtgctgggattacaggcgtaaaccaccacgcctggccgcatcaaacttcccgtcacaaccttattctacaggacatcttttcaacaagaccagctttatccttgttttttgtttgtttgtttgtttgagacagggtctcactctgtcgtccaggctggagtgcagtggtgtgatctcagctcactgcaacctccgcctcctgggttcaagtgattcttgtgcttcagcctcccaagtagctaggattacaggcaggcgccagcatgcccggttaatttttgtatttttagcagagatggggtttctccatgttggccaggctgatcttgaactcctggcctcaggtgatctgcccacctcaacctcccaaagtgctgggattacacgcgtcagccaccgtgcctggcctaccgttgttattgatccttgtagcgaaggataattacctcaaaatagttacgtcatcttcctcaattctcctttagaaatctttgtcttctattacctccctcagtatgtgcatagcttacttactatagcactgcaaagccctatttccaaataaatatccttttgttttagagagcttctccttgtttgttatttaggttgacagtttcttttttgagccttgtagtgggtagaactttgtcccccaaaaatatctgttgaagtccaaaagccccctccatcccctgtacctgggaatgcgaccttatttggaaatagggtcattgcagatatgattagttatggccgaatgcagtggctcactcctgtactcccagcactttgggaggccaaggtgggtggatcacgtgaggccaggagcttgagaccagactgggcaacacgccaacactcccctcggcaaaaaaatacaaaaattagacgggcatggtggcacacacctggagtcccagcactttgggaggccaacgcaggcagaccacaagggcaacagatggagaccatcctggccaacagagtgaaaccccatctctactaaaaatacaaaaattagttgggcgtggtggtggcgggcgcctgtagtcccagctactggggaggttgaggcaggagaatcgcttgaacctgggaggcggaggttgcagcgagccgagatcacatcgctgcactccagcctggcgacagagcaagactccgagtcaaaaaaaaaaaaaagattagttaagatgaggtcacattggattaagacagcttctaaatctgttgtttttttgttgttgttgttgttgttttttgttttttttgagacagggtctcactccctcacccaggctggagtgcagtggcgccacctcggctcactgcaacctccgcctcccgggttcaagcgattctcaaggcagctcctaaatctaataattggcgttcttatcaggagagggaaatttggacacagacacagagacaaacagggaagaaagccaagcagtgatggaagcagaaattggagtgaagccaagtcacaccaaagcctgctggccgccaccagaaactggaagaggcagggaggaccctcccctggagccttcagagggagcacagtggccctccccacacctcgattctggcctccgtcactgtgcgaaaatacatttctgttgtctgaagccacctggtttgcagtcatctgttacagcagctacagaaaacaaatatcagcttctttctaccaggtggcaggaggcaaacctcatcaatcctagccacttccacaaactcactcttcctgtgacagggggttggtgtggagcctgagggtgggggtgaagctgtcctcacagggttaacaagaattctgtacagattggccgggagcggtggctcacgcctgtaatcccagcactttgggaggccgaggcgggtggatcacaaggtcaggagttcgagaccagcctggccaagatggtgaaaccccgtttctactaaaaataaaaaaaaattagccaggcgtggtggcaggcgcctgtagtcccagctacttaggaggctgaggcaggagaattccttgaacctgggaggtggaggttgcagtgagccgagattgtgccaatgcactctagcctgggtgacagagcgagactccatctcaaaaaaaaaaaaaaaaaaagaattatgtacagacatatagttataattaagcattaggctgggcctggtggctcacgcctgtaatcttagcactttgggaggccgaggcaggtggatcacctgaggtcaggagttcgagaccaccctgaccaacatggtgaaaccctgtctttactaaaaggacaaaaaattagccgggcgtggtggcgggcgcctgtaatcccagctactagggaggctgatgcaggagaattgcttgaacccgggaggtggaggttgcagtgagtcgagactgcaccactgcactccagcctgggcaaaaagagcgaaactccatctcaaaaaataaaaaattaaaattaaaatgaagcattaatctggctgcactctgacctgcttccttgtaacagaaaagcacattgcactagacactgaccatttgcaccacatagataccatctctgacgttagaagcaaaatacttctgtttaagaattgcttaagcaggccaggctcattcctgtaatgccaacaatttgggaggccctggcaggaggattgcttgagcccagctgtataagactggcttgggcaacatagccagacctcatctctacagaaaatttaaaaattagccaggcatggtggtgtacgcctgtagtcccagctactcaaaaggctgaggtgggaggatcgcttgaacccaggaggtcacagctgagtgagctatgattgcaccactgcactccaaccagagcaatagagcaagactccatctctaaaaaaacaagaacagggccaggcatggtggcctgcggctgtaatcctagcattctgggaggccgaggtgggtggatcggatcacctgaggtcaggagctggagaccagcctgcccaacatgggaaaaccccgtccctacttaaaatacaaaaattagctgggcgtggtggcgggcacctgcaatcccagctacttgagaggctgaaacaggagagtcgcttgaaaccgggagacaaaaggttgcagtaagccgagatggcgccactgcactccagcctgggtgacagagcgagactccgtctcaaaaaaaaaaaaaaaaaaaaaaagccagggatggtggctcacgcctgtaatcccagcactttgggaagctgaggcagacagatcacctgaggtcaggagttcgagaccagcctggccaacatggtgagactcccccccaccaactaaaaatacaaaaattagccgggcatggtggcaagtgcctataatcccagctactcgggaggctgaggcaggagaattgcttgaacctgggaggcagaggttgcagtgagatgagatcatgccgctacactccagcctgggggacagaatgaaactctgtctgaaacatacaaacgaacaaaaaaagttttggagtgtggcgcctgttgactggttgaagagtgcagggtgaagttctgggacgggggagggagaagctatgttctcatgctcatcctgctcctctctgggggccttcacactagctggtgtcagctgttctgctggaattcaggatctactcaagcaattctcttttttctttctttctttcccaggctggagtgcagtggcacaatcttggctcactgcaacccctgcctcccgggttcaagagattctcctgcctcaggctcctgagtagctgggattacaggcatttgccaccgtgccccgctaatttttgagtttttagtagaggtggggtttcatcatattggccagactggtctcaaactcctgacctcaggtgatccacccgcctcagcctcccgaagtgctgggattataggcatgggtcactgcgcctggccgcaattcttttttcgacacagggtcttgctctgttgcccaggctggagtgcagtggtacagtctcggttcagagcaggctcaacttcccaggctcaagtgatcctcccacctcagcctcccgagcaactgggacgacaggtgtgtgccaccgtgcctggctaattttttattttttatagaaatggggtctcactttgttgcccaggctggtcttgaagtcctaggctcaagcgatcgtcctgccttggccttccaaagtgctggcattgcagacatgaaccacggcacccagcaaggtagtttgcttgtgtaaaacaaaaactccaaagtatttggaatgcaaatgccttttgtctcaaaccttctagactttgagtttccaagtcaaccaaacaactcaaaagccaagaacaaggaggaaatattggcttccttccttcctgtctgctgtgtcatctgtctcctccctgaggggtcaagggaaattgctccctgctggctgggctggagtggccagggcacagccaaagggaaggacccagggtgaccacactccagggaattccctccaaccccactcacgggggttttaaatcagggagaaatgggccacgctggtggctcacgcctgtaatcccagcactttgggaggccaaggtgggcagatcacaaggtcaggagttcgagaccagcctgaccaacatggtgaaaccctgtctctactaaaaatacaaaaccctgtctctactaaaaatacaaaaattagctgggcatggtggcgcacacctgtaatcccagctactcaggaggctgaggcagaaggattgcttgaacctgggaggcagagggtgcagtgagccaagatcacaccactgcaccccagcctgggtgatagagcgagactccatctcggaaaaaaaaaaaaaaaaaaggcagggggaaacagaatggaccagtctctgtggctcacccctgtaatcccagcactttaggagactgaggcaggagaatcgcttgagcccaggagttcaaaaccagcctgggcaacacaggaagaccttgtccctacaaaatacaaaaatgagctgggtgtgctgggtggcaagcacctgtggtcccacctatttgggaggctgagacgggaggactgcttgagcccaggaggttgggactgcagggagccaagattgtgccaccgcactccagcctgagcaagagtgagatcctgtctcaaaaaaaaaaaaaaaaaaaaaggctcaggcctgtaatctcaacactttgggagaacgaggtgggggtggatcccctgaagtcaggagttcgagaccagcctggccaacatgatgaaaccctgtctctactaaaaatacaaaaattagccgagtgtggtggcacgtgcctgtaataccagccactcaggaggctgaggcagaagaatcgcttgaacccgggaggtggaggttgcagtgagctgaggttgcaccattgcactcctgcctgagcaacagagtgagaccccttctcaaaaaaaaaaaagagtagaaatggaatgactactgaaaatgtgcttccgatttctacatggaccctggaggaatttctctttcctaggagcctccaatcagtgctgtccactgggactttctgtgatgacagaatgttctagatcttcgctgtccagtacggtgacccccagacgccagtgacgactgagcgcctgacatgcgggcagggtgcctgaggaatggaattttaaattgtatttcattttaattaattttaacttaaatagccacatgtgcttactggataccctgtgagacaaccctgtgagtcttggataaagcaacgtgcccagctgaaagtctacaatcagagggaggggaaaaagcaaagcccatattaggaggctggaccataaataaaacacactttaattatgcagctgggtgcagtggctcacgcctgtaatcccagcactttaggaggccgagatgagtggatcacttgaggtcaggagtttgagaccatcctggccaacatggtgaaactccatctctactaaaaatacaacattagctggaggtggtgtggtggcgggcgcctgtcatccaagctactcaggaggctgaggtagaagaatcgcttgaacccaggaggcaaaggttgcagtgagccaagatcgtgccactgcactccagcctgggcgacagagcaagactctgtcacaaaaaaataataataatagccaggcgtggtggctcacacctgtaatcccagcactttgggagaccaaggcaggtggatcacaagatcaggagtttgagaccgatccggccaatatggtgaaactccatctctattaaaaatacaaaaattaggcgggtgtggtggcgggcgcctgtagtcccagctacttgggaggctgaggcaggagaatcgcttgaacctgggaggtggaggatgcagtgagacaagatcgcgccactgcactccagcctgagggacagagagagactctgtctcaaaaaaataagtaataaaaattaaaaaataataattatgggacagtggagggttcgtgggtgggaagcttttctgcaggtctttcatgacggcccctccctttgttctccatggaccagctgcaaaacccaagtcacgtgtgcacatcaccacctctgggggctacttgtcccagcattgaaaccctcagttccccgcagcgagagagcacagaacagaaaacagggaagagtttctctggctgggtttggatctgaagtcagcagacctatcgggcatttgtgtcacatggggaggtcagaggatgggaggcgtctctgtaggagaatcctgacagcattctctgcatttagaacatgcagggcttagagctatcgtgggaggctcccgccacaggagccactgagattacaagattagctgcaatccaaaccacattcggaaaaaaataaaataagaaagggagatacaggcccggtggcggcacagtggctcatgcctgtaatccatagtactttgggaggtggaggtgggaggatcacttggggtcaggagttcaagaccagccggggcaatgtactgagactcccctccccctcgccctgtgtttaaaaaaaaaaagaggaaataaagggaaatatagggaagggaagggagggttgggaggtctcttcaatgagatccttccttccttccttccttccctccctccctcccttctttttttttttttgagatggagtttcactcttgttgcccaggctagagtgcaatggcacgatcctggctgactgcaacctccacctcccgggttcaagcgattctcctgcatcagcctcccaagtagctgggattacaggcgtctgccaccacactcagctgacctttgtatttttagtagagatggggttttgccatgttggccaggctggtcatgaactcttttcttcttttgaggcagagtactctgtcgcccagggtggagtgcaatggcgacatcttggctcattgcaacctctgcctcccaggttcaagtagctgggattacagatgtgcatcaccgtgcccggctgatttttgtatttttagtagaggtagggtttcagcatgttggccaggctggtctggaactcctgacctcaagtgatctcctgcttcggcctctcaaagtgctggaattacaggcgtgagccaccacgcctggcctgatgtggtgattttttttttttttttctgagacagagtcttgctgtgtcaccctggctgaagtgcagtggcacaatctcgactcactgcaacctccgcctcccaggttcaagtgattcttctgcctaagcctccagagtagctgggactacaggtgcctatcaccatgcctggctaatttttgtattttagtagagctggggttttctttttttttttttttttttgagacagagtcttgttctgtcgcccagtctggagtgcagtggcgcaatcttggctcactgcaagctccgcctcccgggttcacgccattctcccgcctcagcctcctcagtagctgggattacaggcacccaccgccacgcccggctaatttttttgtattttttattagagatggggtttcaccgtgttagccaggatggtctcgatctcctgacctcgtgatccacccgcctcggcctcccaaagttctgggattacaggtgtgacccggccaagctggggtttcaccatgttggccaggctggtctcgaacccctgacctcagatgatccacccacctctgcctcccaaagtgctgggattacaggcgtgcaccacagcacctggcccaacgtggtgatttctaagtagggagctgagggagtaaggagccagccggtggctgtctgagagagactgtccctggcagagtgaactgctaatgccagtaccaggtcctgggccaaacagaaagaaacgggctctcactccagaactgcagcttgaccactatatatataatatatatactttatatatattatagctatatatttttttgagatggagtcttgctctgttgctcagactggagtgcagtggcacgatcatagctcactccagactcaacctcctgggcttacgccatcctcctgcctcagcctccccagtagctgagactacaggtgcatgaccaccacacttggctaatttttaaattttttgtagagacgcggtgtcactgtgttgcccaggctggtctccaactcctggcctcaagcaatcctcccacctcagccttccaaaatgctgggatcacaggtgtgagccatggtgacttggcttcatattttgaataggccaaaacaaaactccgaaatccccttactcctatccccacgaccccacacagcaggtttctctcgctctgcagcaacccacttacctctcggaaatcatcccaggcctgttcggagtgcacgcagccccgttagcctccctggctgctcctgtaaccagcccagctctgcctgagaggttccgctattccctccgtctggaatacccaccactctctcccaccccgcgcttgcatccggcaatactgtatcagcctcagggcctctgctgtcccgctttctgctctcagagcctttgtcactgggctggaagagcagttgggaaaattcggtgataaatgcatagcccggggctgggaccatcaaggggacccagtaagttggctccagaaagaggacttgaagcttcgtttgcattgcacgttatttaatattgaggaaaatgtaattagcccgtatctaagaattggggtgacagcgctaaagattgaacccacccacctcccactcctcacctccagccataagccacttccggacaaggctaaaaatgcgtaaaacaatgcaactactcgccacctatccctgcccaagttccagcctctgagcctcaagccccacgccctcctaaatatccccgcccccgctgggaccccaaattgcctatagctctgcaagtccgcccttcccggcagcgggaccgaaagggtaaagcagaggctcccggctcgctgagtgacagcatggccggcggccggggagagccgaccaatcagggagggcgtacgcgacccacgtgcgtaaacggcctcgctattggccggcgccgccagaggcctgccccccccggagcccgaacccacgtgcagctactgcgccttcattgatctgcttcgcggtccaggtggcggctgggtggggcctgggcgggacggggcggggacaaggcgggacgaggcggggcccgatgggtcaaatggcccccggtgggggaaggaggagtttcctcttggcctgaacttggctgacctccgcagcttccgcccggtgagggacgtgagttgccaggcgtgttctagggggctggggggactccaggattcccggccggggaaggggctgcaggggcgtggaggggcaggactgaggcaaggaagaagctgggtgctgcagcagggatggaggtggagagaggtcgtttcttctgtctgatgaattccgcctaatgcacctggctaactcctagtcatccttcaaaacccctttctagtgatctccctgcgctttaggaaattgtctcaaaactaaggttgagctttggcgaccttccctgggctcccccgtccctgactgcccccagcagggagtgtatgtgcactatccaccccagcctcctagggtgaggcctgggaggcaaggctcagttctttctgggtccccgcccccatgaatctgggcagctggaggcattgataagtgaggacaggacctagggaacgcatgggagaaccgcaggattgggtccctggagacttaccaaactgggaggtgcgggtggggtaacgggtgccttgcttccctggcactgccttattttctgtccctcaagacctgccgtctccttgttgttttagactctggctaaagtcttggaggctactgccttgaagatgacctctagggaccagcccagacccaagggccccccgaaaagcacttcggtgaggagggcatgtggtgggatcagccctcaagggaaacccgggcccaatgtggttctgccccttttccacctgtgacctgggctggccccgcccaggcctcgcagctgaagacaatactggtcgctgctacactcaagacaggtgccaaggagccgtgttttttaaaaaaaattaagtgtaggctggacactgtggctcacaactgtaatctcaacatttttggaggccgaggcaggaggaccacttgagcccaggagtttgaaaccagcctggacaacgtagtgagaccctgtctctgtaaaaaataaaactagaagaatcagctgggcctagtgacgtgggcctgtagttgcagctacttgggaggctgaggcagagggttggcttgagcccaaggagtttgaggctgcagtgaactatgatggtgccactgcactccatccttggtgacagtgagatcccatctaaaaaaaaatgtagcatctaatcacatatgtgataaaaacacaggaacacatcatgtatttggttgatgttttacaagcaatccccgctccctgcactttgcgtcccagagatgaccatttgtaaatttaggctctcagggctgagcagacgtttttttttgtaaaggagtcagatgagggatattttgttttgagactttatgattttattatgtttgagacggagtctcacactcacctcggctggaatgcaatggcgcaatctcagctcactgcaacctctgcctcccgggttcaagtgattctcctgcctcgcctcccgagtagctgggactacaagcacctgccaccatgaccaccaaatttttcttgtatttttagtagagactgggtttcaccatgttggccaggctggtctcgagctcctgacctcgtgatctgcctgcctcagcctcccaaagtgctggggttataggtgtgagccaccacacttggccaagagactttattttattgagtcttgctcttgttgcccaggctggagtgcagtggcgcgatctcggctcactgcaacctccacctcccaggttcaagtgattctcctgcctcagcctcccgagtagctgggattacaggtgcgcgccaccacgcccggctaatttttgtattttcagtagagacggggttttgctgagttgcccagggttgtctcaaactcctgacctcaggtgttctgctcacctcggcctcccaaagtgctgggattacaggcatgagccaccttgcccggacttttatttttaaaaatattttgtgcttctattttcatcacaagaatgtggtgaacattttagactttaggccaaagtgcaaaatggaagatgctctttactgaaataagagaggccgggcgcggtggttcatgcctgtcattccagcactttaggaggccgaggcgggtagatcatgaggtcaggaggttgagaccagcctggccaagatggtgaaaccccatctctactaaaaatacaaaaataagccaggtgtgttgccgggggcgggcgggggaggggggcgcgggcgcatgtaatcccagctactcgggaggctgaggcaggagaatcgcttgaacccgggaggcagagtttgcagtgagctgagattgtgccactgcactccagcctgggcgacagagcaagactcggtttccaaaaaaaaaaaaaaaagcaaaaaccacaattacttttgcaccaacctaatgcctatgccatgttgaggtggagaccgggggtcttgggtgttggagcattgtaagttttatgtaaccttgctttgacctttccagccttgtcctgggatctcgaactctgagagctctccgacgctgaattatcagggcattctaaatcggctcaagcagttccccaggtgagagcaattccaggggccggaggtctcacgctgggaaggagccccacctggcctctctcccgggggtcctagtgagtggtctagaggctgctggcccaagagccaggctcaggaacaggaagccatgcagatacccagcatggagaacccggcaatacccatcccagcttttgattaaacaaaattaccaacaaatattaaaattttgattttcctgttcgacatggatttgttggcattcaattttattgttgaaaaatactgcaacggctgggtatggtggctcgcacctgtaatcccagcactttgggaggcggaggcgggcggattgcttgaggtcaggagatcaagatcagcctggccaacatggtgaaaccgcgtctctacaaaaaatacaaaaatcagccaggcttggtggtgggtgcctgtaatcccaactacttgggaaactgaggcaggagaatctcttgaacccaggaggcggagggttgcagtgagccaggatcacaccattacactcaagcctaaggctacagagtgagactcggtctttaaaaaaaaaaaaaaaaaaaagtactgcatgggctgggtgcagtggcttgcacttgtaatcccagcactttgggaggcagaggcaggaagatcgcttgagcccggagttcaataccagccttggcaacatagcgagatgccatctcttaaaaaataaaaaaaatctagctgagtgtggtggtgcacacctgtagtcccagctactcaggagactgaggcaggaggatcatctgagcccaggaattggaggctgcagtgagccatgattgtaccactgcaccctagcccgggcaacagggtgagattctgtttaaaaaaaaaaaaattgaagaaagtggcggggcgcggtggctcaagcctgttgtaatcccagcactttgggaggccgaggtgggcggatcacctggagtcaggggtttgacaccagcctggccaccatggtgaaacactgtttctattaaaaatacaaaaaaatagctgggtgtggtggcaggtgtctgtaatcccagctactcgggaggtcgaggcaggaggatctcttgaacccaggaggcggaggttgcagtgacactgcactccagcctgggtgacaagagtgagactctgtctcaaaaaaaaaaaaaaaagaatatactgcattaaaatcttactgaacttcttgacactgccttaaatttggcttctggagccagtgccttccagcttcattgagaccctccctaggggttgagggtggggctcactctggggagggagtcctgaagccacaggtcttccagcctgtcctccttccccctcaggttttctcctcattttgctgcggagttggagagcatttactactcggtgagccagacccaggcagccccaaccaaggagggccccactgggacaagctgaggccctggtttcccggccctgcctcctgagtgccctagagaggttcttttccgccaagcactgtgcctcacgcctgtaatcccagcactatgggagggcgaggcaggtggatcacctgaggtcaggagttggagaccagcctggccaacatagtagagaccctgtctctactaaaaatacaaaaattagccgggcatggtggcaggtgcctgtactcccagctactcgggaggctgaggcaggagaatcgcttgagcccaggaggcagaggttgcggtgaactgagatcacactgtactgcagcccaggtaacagagcaagactctctctgaggaaaaaaaaggtagggaccatacatcagtgtagtaagaaagtaaaagagaaaacaaggtgaaaacaaaaatttaaggtgggggagtaggggccagagaggtagagcagcttgcccagggtcacacagcattcacacccggaccacctcccgatgggatctctgttttccctttgcagctgcacaagatccagcaggatgtggcagaacatcacaagcaggtgggtgaccaggagctcaggggtgcggctgtccctccatgaaaggcatgagaaagcacagaggggggccgggcacagtggctcaaacctgtaatcccagcactttgggaggccgaggagggtggatcacttgaggtcaggagttcgagaccagcctgatcaacatggtgaaaccccgtctctactaaaaataaaaaaattagccaggcgtggtggcgggcgcctgtagtcccagctacttgggaggctgaggcaggagaattgcttgaacccgggaggtggagattgcagtgaggcaagatcgtggaactgcactccagcctgggcgacagcgagactctgtctcaaaaaaaaaaaaaaaaaaaaaaggaggtgggggatggtgaagacagaggacgaggggtaggtcatgctgagccttgtgggccgtgggaaggacttgggctttgaccccaagggaggtgggagccatggaggactgctggcagaggagggacatgccctgacttggaagcccccgtgatattagtggaggccccatatcttggggagcatctcctgtcctgtctctgagctgcttccaagagagggtcagtcctgctccttccgctccctgggcccctgcgcaacctagatgaccctttgccggtcagttgctttggacagagagagcctgtgatggggcaggcacccggctgtgttcccctgcgtgtctgagtgttcaatgaggggccatatgacatgggagtgaggggagctctgcatgggagggggcgcccgggctcccatctcccagcccagggcgcctggcccaagcagaagtacgccttccagccctgcctgtcctcccgccacctggccttttctcccaggcgctggcaggattttccgcctgtgccagatgtaactggcaggggcccagggccgtgtctgcaacttagcagggcctgggaggaggggggcagcgaagggaacagggtgagggggggccaggaagcaaccaaaacatggttattcattcagcagatatttatccatcacctccttgccaaatactgttgtagaagccaggaaaatagcaaagaacgacgcagagcttcccacccttggggcgagtggagcctggtagatggagtgttaggggatgagggctgggcaaggcgggggatggaagagagcagccccaaggggattggggaggccagggtgggcgagggttgcaattcagggtggtcagggaaggcatgcgagaaggtgacatctgagcggaggcttaaaggacatcaaagaggaagtgtggctgtctgggatgggagggatatttcaggcagagggcacagcctgtgtgaaggccctgaggcaggacggtgcctgttgtgttggtcctgaaggcactacgaggaagcccgcatggctggagcagagtgagaggaggagggggggagggcaggccacgcatggccctgtgagcttcagggaggacttgggctttgaaccctgagggagggaggtgggagccatggagggcttcagacagagggcaggccctggctactgcggagaggacagagaagaaggaggagggatgagggcagaagcccgggaaccagttaggacagtccaggtgtggaatgctggttgcttagtgatgagaagtaattgaataattgtggacgtgttttgggaggaacttgaccgcagctgctgagcatcaggatacgcagggggtgagggctccagagcaaaggagccacttcggttgcagccagacccaggagggtccctgcccagcccccactgcagggggccccaggatccctggcagcccagcctggcctgtggtcctgggcagtccgcttcccccacccgctgcttccagttccgggctttcccagccgcctcgctgtgctttcaaaatcgccatcagcacagccccctcctccgacagcccgcctgccactctcccccgggagggctgctagcaggcacaagggagccacacttttcatgctgagcgcattaaagtgccggtaaattgcgcattaacgaggcggggtgaattggagagggctcccctgggatttgctgctgctgggcgggctcagctgggaaatccatcactggctgccccaggaggcatcagcctggagtccccccccccccgcggggctccgatggagggtctcccctcccggcccctccctccgccgtcctgctaaggaaacagacaggtagcctttttgtagaaaaaaacttaagagataggatcactcgccttgctttctttttttgttgttttgacggatcatgctccgtctcccaggctggagtgcagtgggaggatctcagctcactgcaacctccacctcctgggttcaagtgattctcctgcctcagcctcccaagtagctgggattacaggtgtgtgtcaccatgcctggctaacttttatgtttttagtagagacagggttttgccatgttggccaggctggtctcgaacttctgacctcaggtgatccgcccgcctcagcctctcaaagtgctgggattaccggtgtgagccatcgcacctggccaatttctttatactttgaacatggctactagacattccatatgcatgactatatttatgtattattccaattctacttgtactggatggtattgatctcgattttattctgtttactgagaaactacatttaacttcgggattgacagtggtcagatggcttgatttttgttgttgtttgttcgttttaaataaaacaccagactgggtgaggtggctcacgcctgtaatcccagcactttgggaggctgaggtgggcagatcacctgacgtcaggagttcgagaccagcctggccaacatggagaaaccccatttctactaaaaatacaaaattagctgggcatggtggcgggtgcctgtaatcccagctacttgggagcctgaggcaggagaattgctttaacccaggaggcagaggttacagtgagcagaggtggtgccattgcactccagcctgggcgacagagcaagactgtctcaaaagagaaaaaaaaattaccactgacttgtttctatcaattctccccagcaggtaaccctcagtttcttagtatctttccaaagtttaagcaaattaaaacgtcttcctcacctagggagacctaggtatgctgttttgctgcttgaagcctttttttttttttttttttttgagacaagtctcgctctgtcacccaggctggagtgcggtggcatcatctcgcatctgggctcactgcaagctccgcctcctgggttcaagccattctcctgcctcagcctcccgagtagctgggactacaggcacctgccaccatgcctggctaatttttttttttttttttgtatttttagtagagatggagtttcaccatgttagccaggatggtctcaatctcctgacctcatgatccgcccgcctcggcctcccagagtgctgggattacaggcgtgagccaccgcacccggcctgcttgaagtcatttgaagcaaagtgtggtggtggtcaggttttctttttaaaacatcccaaaaagagtagctggggccaggtgtggtggctcacacctgtaatcccagcactttgggaggccaaggcaggagaatcatcttaggtcaagagttcaagaccagcccggccaacatggtgaaaccctgtctccaccaaaaatacaaaaatcagtctgtgtagtggcacacgcctgtaatccagctacttgggaggctgaggcaggagaattgcttgaacccaggaggcggaggttgcagtgagccgagatcacatcactgcactcctgcctgggccacagcgtgagactgtctcaaaaaaaaaaaaaaaaaaaaaaaaaaaaaaaaaaaaaaagatatatgccaggtgcgataggccggatgcggtggcttaaacctgttatcccagcactttgggaggcacacgtgggaggatagtttgaggccaggaattcaagaccagcctggccaacataatgagactcccatttctacaaaaagtgtatttaaattagctgagcgtggtggtgcatacctgtaaccccagctactcaggaggctgagatgggaggatcacttgagcctgggaggttgagggtgcagtgagctgtaatcgcaccactgcactccagcctgggtgtcagagtgagatcttatctgcaaaaaagtagatgaaggctgggggtggtggcttatgcctataatcccagcactttgggaggctgaggtgggcagatcacctgaggtcaggagttggagaccagcctggccaacatggtgaaaccccatctttactaaaaatacaaaaattagctgggtgtggtggtgtgcacctgtaatcccagctactcaggaggctgaggcaggagaaccacttgaacctgggaggcggaggttgcagtgagccgagattgcaccactgcactccagcttgggtgacagagtgagactctgtctcaaaaaaacaagtagattgatataccttcttctacaggtggggataatcatgctgtaggattgcaaacccttaactgcaacaacatttaactgttttgctgccaacctccttctagataggaaacgtcttacagattgtggagagctgcagccaactccagggtttccagtctgaggaggtgagtttctgggtcttcaaggaggggaggggacaggcttgggtgaaggctcatcctcaaagctctcactgccttgttcctgccgggccaggtctcacctgctgaaccagccagccctgggacgccccagcaggtgaaggacaagaccctgcaggagtcgagctttgaggacatcatggccaccaggtcctccgactggctccggcggcctttgggggaggacaatcagccggagacccagctgttctgggacaaggagccttggttttggcacgacactctgaccgagcaactctggcggatttttgccggcgtccacgatgagaaggcaaagcccagagacagacgtgagtgtccctgagggtgagggggaaggggcagccacaggctgcgtctcaggggctgtgcagtgaaccctgctgttctctctgtccccctcctcctctccgttgtcatggtgacagagcaggcaccaggcctggtgagtaaacaacctcagctctatccagaggggtgggcttccgggcaggcggttgggctcccccaggtcagggcactggggttcctgtgggatttgtcttccttccatcctgcccctcgggtcccccgggggggacttgggtgatccaggaggctatactggagtagcccaggacccacagcccagggcttccaggaccctataccctgactctctctctgcaactctgcctggacccgcagacaggaccccaggcagctgacaagccctgtgcaagctgcccaggaatccgaggtcttctggtcctaacaggcaggtcagcaggcctgatgagacttttccattttccaggggcaggaaagcaaggcaccaggatcctgtgacccaggaacagacccatgtcctgaagatgcctccagtaatcccagcgggcaggggccgaccgactccaggcgggatggggtgggggcatcctgtgctgaggagccaatgcaagccgcttagcccctcttgtctccccactagcccccaggccacctgaggcctcctccagtccccctgagggttcccaagacaggaacacaagttggggtgtggtccaggtgagacccaggcccgagctggtagcccagcgtgaaggctgcccagggtggggtagaggaggtgggcacagatgtgcggggaggctgggggcagctgtgatctcccccgcctgcaggagcctcctggaagagcctctcggtttctacagtccatgtaagtgtctgcactgtttgcttttgggcggggtgaggggcagcgggaattccttcctgtctatacctctgttcccgacacatagaggggaacagaggtgtaagactttcttccccttttcccatcactactctgccatcctctccaacagccgctgcagaggctgggtagaaaagtgcagtgttaggccgggcgcggtggctcacgcctgtaatcccagcactttgggaggccgaggcgggcagatcacgaggtcaggagattgagaacatcctgggtaacacggtgaaaccccgtctctactaaaaatacaaaaaaaattagccaggcgtggtggtgggtgcctttagtcccagctactcgggaggctgaggcaggagaatggcgtgaacccgggaggtggaggttgcagtgagttgagatcgcgccactgcactccagcctgagtgacagcaagactccgtctcaaaaaaaaagtgcagtgttaggctcacaggatcgccgccccaacactgggctcaaggcatttggggaagactttttcatggaaggggatggggtgtagctgtgttagaactggatgcagattgtcccaaccttgtggagtgatgctgggagaacccaggtggggcaaagaaggcttttctggggaaggagcataatagctaggaccataaaggatgaataggagttcttcctcctggggcaaagcagtctaggaagaaggcagaagtatgtggagggctgtggcaaagggacaatacttgaaggaatatgagcaggacattgaggggagtctagagggtaaaacaaggcctgagagagggaccccaaaatctgaaaaagaagcccctctaggccttgatgtgtggctcccactgggcaaaggggctcacaagcaggtcagttaccccaaggcctcccctcccaagatcctgggaccctgaggactttgaagatgcatggaagaggccagatgccttgcccgggcagtcaaagagactcgccgtcccgtgcaaactggaaaagatgcggatcttggcacacggggagctcgtgctcgccacggccatcagcagcttcacgcggcacgtgttcacctgtggcagaagaggcatcaaggtgtggagcctgactggacaggtggctgaggacaggttccctgagagccacctgcctatacaggtgaggacggccttggtttccagggatgcagggcttctgggaacagggggtttgaggtttgagtctggcagagcccagatcgtggagagagggcttccagggaaaaggggcataatagctaggaacctaaaggatgaataggagttcgctctcatgaggcaaagcagtccaggcagaatgccacggggggcgacagctcacagtgactctgcccatcccagacccctggggccttcctgcgcacctgcctgctgtcctcaaacagcaggagcctgctcaccggtggctacaacctggccagcgtgagcgtgtgggacctggcggcgccctccctgcatgtgaaggagcagttgccctgtgcaggtctcaactgccaggccctggatgccaacctggatgccaacctggccttcgccagcttcaccagtggtgtggtcaggatctgggacctgcgggatcagagtgtggtcaggtgcgtttggggggtgggaaggggaagcatcctgtgccagcctcctgtggccacctctgcccaccttactgctaccacctctgcccgccttcctgccacctcctgaacctgggatatagcactctcccagccaaaaccccttgcccccttgaacttggatttgagaaagtttagaggtgcggacttgaatcttggctggactgcgttccttgcagcccagggcattttactttttgtctgcctcagtttccccacctggacacaggatgtgacagccccaaactcaaaggcttgttagagggcaaatttgttgtaaaaatataaaacagcaggccaggcctggtgcctcaaacatgtaaacccagcactttgggaggtcaagacgggacaaatgcttaagcccaggaattcgagattaacctgggtaatgaataaaacgaatttattctatttttattaaatagaataaattttatttaataaaaattaaatagaatttttatatagtctatttaaaaatatgtatatataaattggccgggcgcagtggctcacgcctgtactcccagcagttagggaggccgaggcaggcagatccacgaggtcaggagatcaagaccattctagctgacacggtgaaaccctgtctctactaaaactacaaaaaaattagccaggcgcggtggtgggtacctgtagtcccagctactcgggaggctgaggcaggagaatcccttgaacccgggaggcggagcttgcggtgagccgagatctgtgccactgcgttcccagcctgggcgacagagcaagactctgtctcaaaaaagaaaaaaaaatacacacatatataaataaatatatatataaatacataaatatatacataaatatatacataaatatatacataaatatatacatatataaaaaacagtctgggtgcggtgtctcacacctgtaatcccagcactttgggaggccgaggtgggtggatcacttgaggccaggagctcaagaccagcctggccaacatggcgaaaccccctctctactaaaaaatatgaaaattagccggcgtggtggcacatgcctgtaatcccagctaccccggaggctgaggcaggagaatcgcttgagaagcggagtttgtggtgagccaagatggtgccactgcactccagcctgggtcacagagtgagactctgactcaaaaaaaaattttacatacatacatacatacatacatacatacatacatatatgtatacacacacacatattaaatatatgtaaataggctgggcatggtggctcatgcctgtaatcccagcactttgggaagccgaggcgggcagatcacctgaggtcgggagtttgagaccaggctaacatggagataccccatctctactaaaaatacaaaattagtcaggcgtggtggcccatgcctgtaatgccagctactcgggaggctgaggcaggagaatcgcttgaacccaggaggcagaggttgcagtgagctgagatcgtgctgctgcactccagcctgggcaacaaaacgagactccatttcaaaaaaaaaaaaaatacgtatatatatatatatatatacacacacacacacacacacacacacacacatatatataatatatgtatttataacatataagatatctatcagcatatgtttgcaggaagcaatggctgacgtaaaatacagcacaccacccgcccggcactattccccttccctgcttgaagggattcctgtagacctgcctcagagctcgggtggactcagggtggaagaggcaaggggaggcctaggtgaggccaaggggaggcccaggcggacggagaagggaggctgagggctgggaggggccggcactagatcctgtgtctgttttctgccaactttgacactctgtgcaggcagagatttttgggtggtggcactgtccctttcatgcccaaatgtagtgactggtgtttccgggggcccaaacctcagagtcttgacctgattgcctcccgatgtcccttctggccagggacctcaagggttatcctgatggagtcaagagtatcgtggtcaagggctacaacatctggactgggggtccggatgcctgtctgcggtgctgggaccagaggaccatcatgaaacctctggagtaccaattcaagtctcaggtgcggaggccgggatggggtctgcttggccaggcatcctctggtcctcagattaaaaaatgaggttgaggccgggctccgtggctcacgcctataatcctagcactttgggaggccaaggtgggtggatcacctgaggtcaggagtttgagaccagcgtggccaacatagtgaaaccccatctccactaaaaatacaaaaatcagagctgggcgcagaggctcacacctgtaatcccagcacttttggaggccgaggagggcaaatcacctgaggtcgggagttcaagacgagcctgaccaacatggtgaaaccccgtctctactaaaaatacaaaattggccaggcatggtggcacatgcctataatcccagctagtcgggaggctgaggcaggagaatcgcttaaacccgggaggtggaggttgtggtgagccgagatcgtgccattgcactccaggctgcgcaataagagcgaaactctgtctcaaaaacaaatgaggttggccaggcacagtggcgtatgcctgcaatcccaccactttgggaggcagaagtgggaggaagacttgagcccaggagtttgagaccagcctgggcaacatagtgagaccctgtttctacaaaaaataaaaataaaaattagctgagcatggtggcacgtacctggggtcgcagctagttgggaggctgaggtgagagaatggcttgagcccggggaggctgaggccacagtgaactgtgatcataccagtgactgtagtccagcctgggtgacagagtgagaccctgtctcaaaaaaaaaaaaaagggggggaggcgggtgggggggggggaggatgaactctgggaaggaaaaaaggtagtggttctaagtctcactgatgctccaaacacagagatcattagaaatattctttgcaggccgggcgcagtgtctcacgcctgtaatcccagccctttgggaggccaaggcgggtggatcatttgaggtcagaagttcaagaacagcctgaccaacatggtgaaaccccgtctctactaaaaaaaaaaaaaaaaaaaaaaaaaaacagaataattagccaggcatggtggcgcatgcctgtagtcccagctactcaagaggctgaggcgggagaatcgcttaaaccccaggaggcagacgttgtcgtaagccgagatcgtaccattgtactccagcccggcaacagagcgagactccgtctcaaaataaacactcatgctgtatcaggtgcaaagtagggaagactctccattttacacaccaacaaactgaggcacagatacgaagttgcttgtcccagggctgcacagctaggaaggggtcagtcacccggcctccaggataggtccccaggctcctgcctgcttcctgggccaggctgggacctaaccaggttcctccctccccactgcccattacctagataatgagcctgtcccacagcccccaggaggactgggtgctgctgggcatggccaatggccagcagtggctgcaaagcaccagcgggagccagcggcacatggtggggcaaaaagacagcgtcatcctgagcgtcaagttctccccctttggtaagcggctggcggaagatgaggggactcccctgcagcccccagcctcccacaagaccccacctaatgccagctccccacccaaccctctaggacacctcagaacccttctgtagcagaaaccaattttggggatgctcttatagtggaatgagggagggaagggggtgggtgcctgggcccttcctccccacccgccccaccggcgcggtccgcctccgcccttcccccttcagccactggtgtccccatgagcccggggaggctgaggccacagtgaactgtgatcataccactgactgtagtccagcctgggtgacagagtgagaccctgtctcaaaaaaaaaaaaaaaaaaaaaaggtgggtggggaggatgaactctgggaaggaaaaaggtagtggttctaagtctcgctgatgctccatttctcccaggccagtggtgggcaagcgttggaatggacgacttccttggcgtctacagcatgccggcggggacaaaagtgttcgaggtactgcggtgggctgggggcaggacccgggggtggccccaaagggaccagcctgggcaacacagcaagaccctgtctccacaaaaaacttaaaaagtagccaggtgtggtggctcacggctttaatcccagcattttgggaggctgaggcaggaagatctcttaagtgtaggagttcgagaccagcctggccaacatagtgagaccccatctctacaaaaaataattagctgagccgggtgcggtggctcacgcctgtaatcccagcactttgggaggccgagacgggcagatcatgaggtcaggagatcaagaccatcctggctaacacggtgaatccctgtctctactaaaaatacaaaaaattagttgggcgtggtggtgggcgcctgtagtcccagctacttgggaggctgaggcaggagaatggcgtgagccagggaggcggagcttgcagtgagccaagattgtgccactgcactccagcctgggtgacagagactccatctaaaaaaataataataataattaaaaacacttttaaaattaaaaataataattagctgagtgtggtggtgcacacctgcggtcccagctacttgggaggctgaggcaggaagattgtgtgagtccaggaggtcgaggctgcagcaagctgagattgcaccactgcactccagcctgggcaacagagcaagaccctgtctttctttgaagagacgatgcttcatgcttgagctgacaggtggagaccaggggtgtgtgagccctaccccagctcactgcccactgccccccctccaggtgcctgagatgtctccagtcacgtgctgtgacgtctcttccaacaaccgcctcgttgtcacaggctccggggagcacgcctccgtgtaccagatcacctactgaggggcctcgctgctgtcatcccactccggctcctcttttcatccccccccttccccccccccaacaagggggacatggtggagggaagcgggaaggctcttctgtggcatcgcacgatctagtctgtggtgtagactggtcgccatcacgtgtaataaagcacccgggaaaggcagagtgtggacgcgtcctgtcctctgaagggaaaggggccttcccatcccgtccctgctcaacttgtggaaatctggaaggacttcgtccagcctggtggctctaagcctttttttttttttttttttttttttctgaggcagggtctcactttgttatgcaggctggagtgcagtggtgccatcacgactccctgcagcctctccaactcctgggctcaagccatcctcctgcctcagcctcttgagtagttgagactacatatatgtaccaccgtgctcggctagtttaatttttttgtagatgctgggtgtggtggctcacacctgtaattccagcactttgaggtcgggggtttgagactaacacagtgaaaccccatctctactaaaaatacaaaaattagctgggcatggtggcacgtgcctgtaatcccagctactaaggaggcagaggcaggagaatctcttgaacccgggaggtagaggttgcagtgagccaagatcgtgccactgtactccaacctggcaacggagcgagactctgtctcaaattaatagaaataacaaaattttgtgtagacacagggtcttgctctgttgcccaggctggtctcaaattcctgattttatgtgattctcccacctcggcctcccaaagtgctgggattacaggcgtgagccactgtgcctggtctcaaactcctgatttaagcgatcctcctaccttggcctcccaaagtgctgggattacaggcatgagccaccgtgcccagccctctgagccgtttccgtcctcgttctctgggaatctagtcacagccacagactttgctgttggggtagcagatctccacctccgccgcccggagcagctccaatctggtccgatgtttctggtgtgattccaggagcagtgtgagtggtcctgtcctagacatgtcccatttgaccagtagtctccagtagggtgattctgccccccggggactctaggcgatgtctggaggcatttctggttgtcacgacttgtggggtccccctggcatggagtgggtgggggcagggacattactcaccattctgtggtgcccaagacggccccaccccagaggatggtccagtcccgaggtccacagtgctaaggtcgaaacaaatttccaatagcttcactggtcggccttcttcccacacaagctagggctctggaaacgccacttgcccaccctcccttttccaagctatgaaggggcccagatgtcaacgggcctaggctccttaacccagagaattatcccctttcctgcggtgtctccagaaacatccaccagggcgtgccttctgttctcagcaggaaccctcccatctccttctagaatgttcccagcggcatctactccgcccaacctatgctgccttaaattttttttctagagatggagtcccactattgcccaggctggtctcaaactcctgggctcaagcaatcctgccgcctcagcctcccaaagtgttcagatgacaggtgtgagccccagcaccggtcctaacccttgctgtacgtggtagcccacctgagcttccagaacacggggctgattgccccccactctccccgctccccactgaagccttgtctgcaggcctcgttctccagaacctggctgtcttctgggtaaccaccaggccgagttccccttgcctctgagatatcgcatccgccattctcctctttccagaacagtcttctcagggctctgggggctgtttctcatcccttagtgctcagtgtacccctcccctccactgggcagggacgtttgctcagccctttgccatgcgcagggctcttagaaatccttggaatctagccaggtgcagtggctcacgcctgtaatcccagcactttgggaggccgaggtgggtggatcacctgaggttaggagtttgggaccagcctagtcaacatggagaaacattgtctctactaaaaatacaaaaattagctgggtgtggtggtgttcctgtaatcccagctactcgggaggctgagggagaagaattgcttaagcccaggaggcagaggttgcagtgagctgagatcgtaccactgtactctccagcctgggagacagagtgcgactgtctcaaaaaaatttctacccggaggcctgagtgactacctggagtagagccccgtacaccatgtgggtatgagcaaggaaaaaatgcatgaaccctgagactcggggactacttgttacgcaacagcatcttaacgatcctgcccagcgcaactcctgtgtctcagagtggctctcacataccaggcagacacctctgaatatcctgcagaaagaattctcgttacgtatgaccccatccccaggacatggttgcctcccagtaaccgtgcccaagaggaacaatgatcaccggttccccagcccgagagagaagtgcggatgtgatagatacattttatttccaccgaggtcccctgcccatcggcccccacatgcagcaggggaaggtgtgaagccgttggccagagagcagatgggatgtacggttcctaggcagggctgggaggcggctgctaggatgtctgtcctggctgctgattcccctgggagtctggacttcgggtacaggaaggggggtcatgtctcagtagaccacctcatacacggtggccttcttgtcccccgagcctgtcacgatgtatttgttatttctggagatgtcacaactcaggactgaggacgactccttggactgccaagggaagggagagagaaaagggcacagtgaggcatggtccccacagatgggtgtgtgggcaaggctggggcggagtcaggaacgggaggtcaggactcgcctacagagtgacgtgtttctttttttgagatggagttttgttcttgtcgcccaggctgaagtgcagtggtgcgatcttggctcactgcaacctccacctcccgggttcaagacactctcctgcctcagcctcccaaatagctgggattataggcgcccgcaaccacgcccggccaatgtgtgtgtgtgtgtgtgtgtgtgtgtgtgtgtgtgtgtaatttttttttttttttgtgagacagggtctaactctgttgcccaggctagagtgcaatggtgtgatctctgctcactgcaacctccgcctcccaggttcaggcaatcctcctgtctcgaactcccaagcagctgggattgcaggtgcatgccaccatgcctggctaatttttgtatttttagaagaggcagggtttcaccatgttggccaggttgggcttgaactcctgacctcaggtgatccgcctgccttggtctcccaaagtgttgagattacacgcatgagccaccgcacccggcctaatttttgtatttttagtagagactgggtttccccatgttggccaggctagtctcaaactcctgacctcaggcgatccaccgcctaggcctcccaaagtgctgggattacaagcgtgagccaccgcgcccggcagagcgacttgttttctacagacaggtgctttggagctaagtccaatgggcagaacagggcctccattccctcaataccaagagagatggaactgaagtgctgccctttctggaagctcagagtgggtgtgcaccaggcatgatgtcacacagcacagcagagggccaaggcaatggcttagaccagggatcagcaaacttcacaaagggcctggtaaacattttaggctttgcctaaagtctaaataagtccatgtcacatattctgggatttttttcttacaaccctttgaaaatataaagggttggcacggtggctcggcgcttccggaggccgaggcaggtggatcacctgaggtcaggagttccagaccagactggccaacgtggggaatccccgtctctactaaaaatacaaaacttagccaggcatggtggcgggcacatgtaatgccagttacttgggaagctgtgggaggagaatcgctttaactcaggaggtggaggctgcagtgagctgagattgcgccactgcactccaggctgggcgacagagaaggactccgtgtcaaaaaaacaaaaaaacactgtaccaaccaggacgggcatattaaaaacactgtaccaaccaggacgggcatattaaaaagacagccaataacaagtgttggtgaggatgcagagaattttaaaatttcaatcactgctgatggggatataaaatttgaaaaacaggctgggtgtggtggctcacacctgtaatcccagcactttgggaggccaaggcgggtggatcatgaggtcaggagatcaagaccatcctggctaacacggtgaaaccccgtctctactaaaaatacaaaaaattagccaggtgtggtggcgggtacctggagtcccagctactcgggaggctgaggcaggagaatggtgtgaacccaggaggcagagcttgcagtaagcagagatagtgccgctgcactccagcctgggtgacagagtgagactccatctcaaaaaaaaaaaaagaaagaaaaacagctgggcgcagtggctcacgcctgtaatcccaacactttgggaggccaaggtaggcagatcacctgaggtcaggagtttgagaccagcctagacaacatggtgaaaccccctctctactgaaaatacaaaaattagccaggcgtggtggtacatgcctgtaatcccagctactcgggaggctgtggcaggagaatcgattgaacccgggaggtggagcttgcagtgagccgagatcgcaacactgcactccagcctgggagacagagcaagattctgtctccaaaaaaaaagaagaaatgagtaagatggcaaattttatttttatttatttatttttgaggcagagcctcactctgtcgcccaggctggagtgcagtggtgcgatctcagctcactgcaagctccacctcctgggttcatgccattctcctgcctcagcctctcgagtagctgggactacaggcgcccaccaccacgcctggctaatttttttgtattttttttagtagagacgggttttcaccatattagccagggtggtctcgatctcctgacctcgtgatccgcctgcctcagcctcccaaagtgctgggattacaggcatgagcgaccgtgcccggctggcaaattttaaattttataatattatatgcatgttactgcaactaaattttagaaaaaccaacaggctacgggcagatgaggcgaggcctccggctgaaattccaacctctgctttagtacctgggcggtagggaggcttgcaggaccctgaggaggggttagggtggcggggggacctgggggacagggacaggggcaatctctctgtctgaccctggcatacccgggcacatggccctgccagagtgggggctccagaccgccgagtacctggaaaatgctggccccgtacggcgtcctccaggcgttgagcaggttgtccttcccggtgctcacaaaccaccgtccttggggaaggagagcagcagggttcaaggagggggcactaacgagagacccgggctgcagggggaggtcggggaagctgggtctgggtctggcctctccctttttttttttttttttccaagaaagggtcttgctctgtcacccaggctggagtgcagtggtacaatcatagctcactgcagcctccaccacctggactcaagcgctcctcccaagcagctgggaccacaggtgtgcaccaccacgcccagctaatatttttattttttgccgggggcagtggctaacacccgtaatccccactttgggagacagaggtggctgggtcacttgaggtcaggagtttgagaccatcctggccaacatggtgaaaccccttctctactaaaaatacaaaaatcagctgggcattgtggcaggcacctgtaactccagctacttgggaggctgaggcttgagaatcgcttgaacccaggacgcagaggttgcagtgagctgagattgcgccactgcactccagcctgggtaacgcagtcagactctgtctcaaaaaaaaaaaaaaatattttttgtagagttgggatctcactatgctgcccagactggtctcaaactcctggcctcaagcgatcctcccaccgtggtctaccaaagtgctgggattacaggtgtgagccactgtgcccagcccaagttttgtttgtttgtttgtttggtataagatatcccatgtactatttaggatatacttacactaatgaatgatttttttttaaaaagagatagggtctcactgtattgcccaggctggagggcagtgatgtcatcatagctccctacagcctcaaagtcctgggctcaagcaatcctcctgcctcagcctccctcgtacctggcactacaggtgcgacctactggctgtttaatttttttgtagagaaagtcttgctatgttgcccaggctggtcttgaactcctggtcttgggcgatccttctgccttagcctcccaagtagctgaaactacacacatcagctactgtgcctggcttaaatttcttttctttctttttttttttttttttttttttaagatagaatctcactcttgtctcccaggctggaatgcagtggcatgatcttggctcactgcgacctccacctcccgggttcaggcaattctcctgcctcaacctcccaagtagctgggattacaggcgcccaccaccacgcctggctaatttttgtacttttaatagagtcagggtttcaccatgttggccaggcttgtctcgaactcctgacctcaggtgatctgcctgccttggcctcccaaagtgttgggatgacaggcgtgagctaccacacccagccttaaatttgaatctcagataagtcatcagtaatttttaggacaggtatatcccaaatacttcattatttggtttttagtataagtatatcccacacaccatttgggatatacttgtactaacgatttgcttttgagtatataaaacttagtatataaataacattatttgttatttatctaagattcagattgaataggcaccctgggttttgttggggttttgagggcgtgccaccccgccccagaagacacaccgcaggaggcaaacttcagggacagcacgcagctctcgtggaggtgcagctggtatttctccggcttgcggacgtgcaggatctccacgttgctactctccattccgaccgccagccagtcctggttagggcagtggcccagggagaaaatctgggggtaaagagggaagagatggggtcacgagcccctctttgttttgtgttgagacagggtctcactccgtcacccaggctggagtgcagtggcacaatcatggctcactgcagccttgacctccagggctcaagagatcctcctgcctcagcaccagaagctgagactacaggcatgcaccatcacgctggataatctttttttttttttgagacagagtctcactgtgtcacccaggctggagtgcaatgttgcagtctcagctcactgcagcctctgcctcccaggttcaagggattctcctgcctcagcctccaaagtagctgggattacaggtacctgctagtacgcccgggtaatttttgtatttttagtaaagacggcgtttcaccgtattggccaggctggtctcaaactgccaacctcaagtgatctgcccgcctcggcctcccaaagtgctgggactacaggtgtgagccaccatgtcagcctacgagcccctttggatattggggggtgcccagcaccatcaggggttgcgggggtggagtccaacattctccctcttcagcacccccctagagaaaggcagctggcccaggactgggaacacagcagacaactgcatgtcgaatcattaatattaatcagaattacacagaaccctagggctgcacatccattatctgctctgagcgcacaacagcacagggaggagggagagaggagggaggagggacagagaagggaacagccaggcaaggacaatcactccccttaagcagatgatggaagctgaggcagtgtcccctcaaggtcacagagcaagactatgaaagaccaggccttggccgggctctgtggctcaggcctgtaatcccaacactgtgggaggccgaggcgggcggatcatctgaggtcagaagttcatgaccagcctggccaacatggcgaaaacccatctctactaaaaatgcaaaaattagctgggcgtggctgcaggcacctgtaatcccagctactcgggaggctgaggcaggagaatcgcttgaacttgggaggtggaggttgcagtgacctgagattgcaccactgcactccagcctgggtgacagagcaagactctgtctcagaaacaaaaaacaaaaaaaataagacagaccaggcctaggagacagaacttctcactcttagcttggaatgttcctttttgagacagacagggtcttgctctgtcgcccaggctggagtgcagtggtgcaatcatgacccactgcagcctcaacctcctcccatgctcaagtgatcctcccgcctcagcctcacaagtagcttggattacaagcatgtgccaccacacctggctaattttgtatttttggtagagatggagtttctccatgttggtcaggctggtctcgaactcctgacctcaagtgatccacccacctcggcctcccaaagtgctgagattacaggcgtgagccactgcacccggcctcggtttgatttttaaaagattcagggtcctccacctcattttaagcacaaacaggaatcaggctctgttccaccccaaacctcttggagtctcactaacaagatgcctgtggaaataaccacacatttgcagaagagaagactggagggcttcaaatgtcctctcctggccatacagaagtgtttctgtgtaaagacgcattgggggacacccagtgagctaggagatattcaccatgggatccctagaaatgttcttagcccacctaagcttcggggccacgggatggagagctgtgtccacctgcactcctgaaagagaagagcaggttggacataaagagcttgggagggcaagcgcggtggctcaggcctgtaattcccacactgggaagccgaggcaggtggatcacttgaggccaggaatccaagaccaacctggacaacacagtgaaaccctgtctctaccgacaaatacaaaaattagccgagcatggtggtgcgttcctgtagtcccagctactcaggtggctgaggcacaagaatcatttgaacctgggaggcgcaggttgcagggagctgagatcacaacacagcaactctgtctcaaaaaaaaaaaaaaaaaaagaggagcttcggagttaggagttagctcctcttaggtttcaaggaggaggggcaaatgagatgggtcttgagggatgaataggagtttgccaattacagaaagaagagaaaggcatttcagccacagggaacaaatgtgcagaggcctcagagctgtcccggagtatggtgtgcatgagaccagcccatggaaaccctgaatgacagaagaaggagctcacagctgcccccaaagcagtgagaggcaggatctggggtcacggtgcctgaagattcactctctttgcccagccctgaggagcccccagctctgtccagcctgttcaccatgtccttcagcttagactccaccttcaatggggatctctccatgcccagctcctcctacatcaacctccactctgtcctcctggccagtagctcccccatggttagtcctcagttgggaagtgtgtgtcccgcgctctcggcggcgtccagagattaaaggctagaagaaccacccagctacacgaggaaaggcacatataagggtatggctggacaaaagcaggtggggaagatgatctgggggtctcagtagccccacagcttcctatgaatcagctcttttgtgttcccctacatctttagagagttacaggggaagcctgtggatgtgtctgggggacaagaaagatggacaccacagcagatgggagtcctgtcctgtcctgcctctggaagtgggcacctcacaaggagaggaagggatgctgtattcctagagcttccatccccctcctgccagaaccgaacagcacctgggagctgaagtcatgctgctgcagctggcggccctcccgcaggtcccagcagcgcaccgtgttgtccaggccccctgtccagagccgagtgccgtaatcggaaatatcaatgcagctggcgccgtccgtgtggccctggaactgcctggagggagaagggcccaggcgtccatcctggaattcgagctgccccagcatcgtcccaggtcacactcctccactccccctgcaccgagagcggccgggggcttgcccaaggtcccagcgcacctgccacccacctgaccatagtctgattctgcaggtcccagaccacaatgttgccatcgctgcagcaggagaagcaaaccttggcgtcggggctgacggccagggcgtagcaggctggggctgaggaagtcagctcggccttgatacggggggtgggcgccgccaggtcccaaatggacaaggtgctggcctcaccgcccacgatcagactccggccatccggcagcaacttgcaggaacgaatgtagttgtctcggttctggggtcggggagagaagcaggggctgggggttggtcccaggtgaggtctctaggagcctagctcaacgtgggggtctctggagcccaatgtagcctcatcctgattagcctgcaagccctaccctgattggctggtgagccccgcccctttgacctgcaaacactgccccatctgactataagctccatcctttacctataagccccacccatggttggcctgcaaaccctgtcctgattgtcttgcaagtccaattcagattggccagagccccacccctttggcctgcaagccttgtcccatgcgactacgagctccgcccctcacctataagccccgcccttcacctgtagccccacccacggccagcctgcgaacaccgccccattggaacataagccccacccctcacctgtgagtcccgcccactgtcccaccccgccctcaccaggcagtcgagctgggccacgggcgtcttggccccaggctggcccacgtcccacaccttcacacagcccttgccgcccgtgtacacatgctgtgtggagccgctgatggtgaccgcgcagaccacctcgccatgggccagcgtgtgcagctgccgggcgtgccgcgggatgcccgcgcctaccagtgcatccgaggggaagggaaccggctgcatctgcccgtccgcagacacgtggaaggagtaggccctggagagaaagccggggcatgacccagccctgggcaccacgcccccgcacccgcacctgggagggcagggagacgcctttgtcctgcctggcaccctctgatgtgttttttattttttgttttgttttttgagagggagtctcgccgtgtcgcccaggctggagtgcagtggcccgatctcagctcactgcaacctctgcctcctgggttcaagcgattctcttgcctcaacctcccgagtagctgggattacaggcatgcgccaccatgcctggctaagttttttgtatttttaatagagacagggtttcaccatgttggccaggctggttttgaactcctaacctcaagtgatctgcccgcctcggcctcccgaagtgctagaattacaggcgtgagccaccatgcccagcctgatgcgtttgtttcttttttgagatggagtctcgctctgtcacccaggctggagggcagtagcgtgatctggactcactgcaaactctgcttccggggttcaagtgattctcctgcctcagcctcccaaggagctgggattacaggtgcaggccaccacgcctggctaatttttttgtatttttagtagagatgggctttcaccatgttgctcaggctggtctcaaactcctgacttcaaatgatcctcccacctcggcctcccaaaatgctgggattacaggcatgagccaccgggcccagcctctgatgcattttttaaagtaattttctctgttattattttgtagagatgaggtcttgctatgttgcccaggctggcctcaaactcctggtttcaagtgatcctcccgccttggcctcccaaagcactgggattacaggagtgagccatggtgctcggcctctgatttaggaaaaaggcaggacaatgtggtcaaaggtgatatgggacagtcagtgggtggcacaaatacacagggagtctaggttgtggtgtggcgcatggtaaacaagcacttaataaatgttcgttcaaccgaggacccacaaagaaaccttgagtgttccagaccagctagagggtctgtcctaggagccccggccacctgtgaccagttaaaacacttaaatgaactgaaattaaataaacattttcaggccggcacagtggctcacacctggaatcccagcacttcgagaggccaaggtgggtggatcatttgaggtcaggagttcaaaaccagcctggccaacatggtgaaaccctgtctctactaaaaatacaaaaattagccggcggtggtccgtgcctgtaatcccagctactcaggaggctggagcaggagaatcgcttgaacccaggaggtggaggttgcagtgagctcagatctcaccaccgtactccagcctgggggacagagcgaaactcagtctcagaaaacaaaacaaaacaaaacaaaacttttcagctcctcagttgcactgaccacatttcaagtactgaaagccacgcccagctggtggcgactgggttggccagcagtgggtctagaacacttccatcactgcagaaagctctgtggacactgtggccagatctcctctggtggagccatcctggacaatgcaggatgctaagcagcatccctggcctccacactccaggccaggaacgtctcctcccccagctgtgacaaccacacgtgtcccccgacatcgcccagtgtcccctggggggtcagagtctacttctatggagagccagtggaactctgagtagcttatgcaagagactttttttcttttttctttttttttttttgagactgagtctcgctctattgcccaggctggagtgcaatggcacggtctcagctcactgcaacctccacctcccaggttcaagtgattctcctgcctcagcctcccgagtagctgggattacaggtgcccgccaccacgtccggctaatttttgtatttttagcagagacatggttttgccatgttggccaggctggtcttaaattcctgacctaaagtgatccacctgcctcagccttccaaagtgctgggattacaggagtgaaccactgtgcccggcccacacaagagactttctagaagggaagcagggagaccccaaccacagagggtaagacctcagaggaggtggggggctggcccgggaccccaggcagggagccccaccctggtactcacggctttcccccagggatgctgggtagggaggaagagacggatgaccctcggagatggggatgagactcaaatgccatctgtgagaatgccaggggggtgtcagtgaggcaggtgactccaacccacctctgtgccaccccacgcccacctgccatacccctctctgtttatcacccctccccaaggcagcagagatgccttctctctgcctgtcacactacagatgagagggctgaggttttcacttgagcacaccgacaccaaaatctctatccaggaaatcctagaactccacggttccaaggatcctgaagggttctccatccaatgcccagactggctctaggccagggttctgaaaactccagcccctcccaggacaaatctggtccactgcctgtttttgtaaacagtgtcccgaggccaaggccctactgctcctcttcatgcagcttaatcgctgttgcgtttttccacaatcagaagtcttgctttgtattaagcttgtgggactactgagacccccagattgtcttcccatgcatacttgctgagccagggctcccttccctttctgcactcccttgtctctccttgtgtagttggtttctcctcccggcccccagcccctgggccctgctgacacctcctgcgcccccacccaaggactcaccacgggggagcgtccgtacaccacagagctgctgacctggggggacaggtggaggctgacgtaggagctgggcacggagaggtctccgttgagagtgctgtgggagcccaggctgaaggacgtggtgaagggactggacagagtcagggggctcctcagggctgagacggaagagtcggggacaggttttgacgccctggacccagatcccgcctcccactgccttgggagctccctggcctttcatttagagtttccatgtgctggttccacattggccatagcctgggacacctccagacctctgcactatcgttcctccagtggacacgactttctctctctctttttttcttttgtttgagatggaatcttgctctgtcgccaggctggagttcagtggcgcgatctcggctcactgaaacctctgcctcctgggttcaagcaattctgctgcctcagcctcctgagtagctgggactatggccattctccttcttttaattggcaaactcctatccatccttcaaaacccaggcccaccgagcacagtggctcacgcctgtaatcccagcactttgggaggccgaggtgggcggatcacctgaggtcaggagttcaagaccagcctgaccaacatggtgaaacctggtctctactaaaaatacaaaaattagctgggcatggtggtgcatgcccgtaattccagctactcaggaggctggggcaggagaattgcttgaacctgggagcgggaggttgcagtgagctgagatggtgccattgcactccagcctgtgtaacaagagtgaaactccgtctcaaaaaaaaaggaaaaaaaaaaacaaaacccaggcccaatgtccattaacatctcagaaacatccttgagcctccccattgccaacctccagccctgcccatcttgggtacctgccttggtaccagccctgactatacagggctgtgagttttggggtctgggtcctgtccctttttgccacctgggagttccttgagggcagattccaaggccagcttctttcaggggccccagaaccagcccagggcctgaccataaggcagaaaagatgagcactgtcattcctcagattactgatggggaaactgaggctcagagaggttgggtcacttgcccgaggtcacccagctggtgaatgcccaagcctggtctgaaacccaagtctgtctggccccaaagattgtctttccagtgcactaggctgaaacccccgactaagccgcttccactctccaggcctcagtttccctacccgccgagctgacacaatgaggaactgcccagagggaggcagcgtctaacttgaagtcacaaaaaggaccaaggcaatgaacaccaagcctggaatcccagcattctgcctctccagccccttttcctagatctccccagagacgaggcctgctccagacaggcaccaacaggcaaggtgctcaccgacgctgtccgtggaaggtgctggcttggcagcaagctggcagaggtgactggccgagctgggcccgggggtggaagcgtcctggggcggggaggagtcacaggatttggaggcaggagtgctggcgggaaggtcattctgcagagaaagggcaggactgaaggccaccaggcacctggtgtcttgtggcccaacgatctgatcagaaactggggttgggggcggccagtcgcagtgtctcacacctgtaatcccagcactttgggaggcccagtcgggcggatcacctgaggtcaggagttcgagaccagcctggccaacatggtaaaaccccatctctactaaaaatacaaaaaaagattagccgggcgtggtggcatgtgcctgtgatcccagctacttgggaggctgaggcaggagaatggcatgaacccgggagacggagcttgcagtgagccgagatcacgccactgcactccagcctgggagacagagcgactccatctcaaaaaaaaaaaaaaagactctgtctcaaaacaacaacaggccaggcgcagtggctcacgcctgtaatcccaccactttgggaggccgaggccggtggatcacttgaggtcaggagtttgaggccagcctggcgaacatggtgaaaaccccatctctactaaaaatacaaaattagctggacgtggtggcgcatgcctgtaattccagctacttgggaggctaaggcaggagaattgcttgaacccgggaggcagaggttgcagtgagccgagatcacgccattgcactctagcctgggcaacaaaagcaaaactctacaaaaacaaaaaacaaaacaaaaaaaaggcaacaaagttacaaagttataggctgtcaagatttgcaattctttttttttttaatacagggtcttgctctcaaaactaacatgatcagacaggcgctgtggctcacgcctgtaatcccagcactttaggaggccaaggtgggcggatcacctgagatcaggagatctagaccatcctggctaacacagtgaaacctcgtctctactaaaaatacaaaaaattagccaggcgtggtggcacgtgcctgtagtcccagctacccactacccgggaggctgaggcaggagaatctcttgaacctgggaggcagtggttgcagtgagccaagattgcgccaccacactcctccctgggtgacagagcgagactccatctccaaaacgaaaaacaaacaaaaggcacgatcatagctcactgcagcctcaacctcccatgctcgagtgatcctcccgactgagcctcccaagtagctggcactacaggcacacgactccatgcccggctaactttttaaatttttcatagagacaaggtctcactatgttgcccaggctggtctccaactcctgttctcgagtgatcgtcctgccttggcctcccaaagccctgggatgacagggatgagccacagcacccagccactgttgagattcttgaacaacaaggaattagaaactccgggatgggctcgtggagaggcagaccccacagcggcatattcccaggtgaaggaagagtgcctagcacacactgcaatcctccttgagcccccacagagagggaggtgtcacccagagctgtccctccccaaggagagctctgaggaaagcagcagctggacctccatctaggggcaggctctgttatctcggcttcatgtcatcgcctcccctgcctcccctgcctcccaagaaacttcgcatccttgtcttgcgtctgtctcggcttcccatgacaccatcgcacaaacagtgacagccacgcaacaccggcacccgcgagagagtggatgggacgactgtggggtcagggaggacccctgagggcttctccaatacaacggagctgacccatccccttgtaaggtttttcccgcagtgggaggtgggcacttaagatggaatgggagccccaacctctggcggttgccatggtaacctgccaggaagggaggccttgaaaccgggaggggaggcctagaaaccgacatactcttccctggtaagtgtaggggaggggtctggagaagatttggggtgaggggagctgcaaaaggagctgaatttctaatgccctgggggtgcttttagatggctcacatgcctggcattaaactccaggaggtccaactgaaaacttgttcctatattaattatctttccttccggggacaacatctcagcttggggccggtgtgtctctaagcgcctctggaagggctcaacacatgcaggcctgagtccagcctagctggctgggctttcactatgtttatttccatgggatttcctattgattgcaagagagagacctgctttccatgtaaggtagtgaattgccttttaaaatttatctacaaagcttctttacaaagttgccttttaatatttactgaggttcaacaaagtcagtccaagcaggaggtttaaaaaaaaaagcacagggaaagggtggacaatgccagcccggctggctgatttctcatcactgccctctgcatcatggggtagcgtctgcttcggggcccccgggatgaataaagtgagtttcaaggccctcccctcctccttaccaggatgagctccttggctctaggcagcggtgagccaaggctagaggccaaggaggctggactgtccaccaggtcccgacgggcaggaatgcagatgggtacctttccgcagggggtggtagccgggctggggggctctgagggttggtcctgggtttgaggaggtgacgttgagcagagttgaaatgagagggaaagaagagtcccttctctatcctcctcccgactcccaccccaatctctagaatgggtacccatgacccaccatgggaagattatgaaatcttctgctgcctcagtttactcatctgtaaaatgtattttttttttttttgagtctcgctccgttacccaggctggagtaatggcccactgcaacctccgcctcctgggttcaagcgagcacatccagctaatttttttgtatttttagtagagacaaggtttcaccatgttggtcaggctggtctcaaactcctgacctcaagtgatccattcgcctcagcctcccaaagtgctgggatcacaggtgtgagccaccacgcccggcctgtaaaatgggtttaatgataggctctactccataagcacccatagcgaggactatataaaggcttggttttattttcccattgaacagatggggaaaagtgaggccagggaagggggtgtcactgcccacaaatcactcagtgaacctgggcttgaagtcactccctgtgcagtggagaggaggtcggccagaggtgtcccggagtccctgacgcttcctgaccccatcccagctgtcccacagagcggggaaccaggatccccactacctctgggtcctcccagtccagaaaacccaccccttgctctgtgcccagagtcggggaagaggctggacccctggactcacctcgtccaccaccagattgtaatcactcttgtcttcgtcgctttcctgggggaagatgggggagagagctcattgtggtcatgcccctgcctccacaccccctatccgctcctcaggagttggaggcatgagcccagccagccctggggcatgactgggattctcagaccactgcacccgtttgctcatagcagaagggaaggctgcacgtgcccgcatccgggaaggatgtggggaggcagggcaggtgggcaccttgtggagaggactttgaaggatgtggactacatgagtgccctgtgtgactcccggccctctcaggcctcagtttacccctctgcatggtgaggggagagccagagaccagcaatcatccttaccgccttcataaagactccgccttaataaataaataaataaaattcattgccaaagaaaataagactccaccttaataaataaataaataaataaataaaattcattgccaaaaaaaaaaaaaaaaagctattaggtaaaaaggaagatttaaggcttctctgagaaacagcaatattggcccaccctgagcctgccagtctccggggatcaagttgcagctgcccctgtaggtgggagaaggggctccccagctggccacagccccattccccacattcggcctggcccctgggatgctagagttggaaactacaagtgtgcagccgtctggcaatgagaggaggtcccagcctctaggaggtggtcagggaaggcttcttgtaggaggtggcactttgtttcttgatagaaaaatgggtttctaaaacatgtgtgttctagggaaagaaaacagctggagcaaaagctagagggtgggaaaatggctgtacggccaagaggccgcagagacttcaagcaactggagttaagccttgcattacaggatctcctctgattggtcagtactctgagtagtagggagctatgggaggctccggagtgagagaattatggccagagctgggctctggaaggctctgaggggccaggctggtctgggccatgcacgcccatcccagtcctgcacctgcccccactcacataaggtcctgatggctccttctcatctgctctctgcttcccgccaccaccagggccactcggtcgctcctcctccacgagactctcagggggcgagggagatgcactctgcggagagacaaaggccggggggagaaagggtcagggccctgggctcctagattgcattgtgatccagccgagactgagggtcccccaccattattagggtccggacctcaagcttcccatctgggaaatgggagcttccaacggctgactcagtgctaaggttttgttctctcttctgttttgttttgtttttgacggagtcttgctctgctgcccaggctggagtgcagtggagccatctcggcccactgagacccccgcctcccgggttcaagcgatcctcctgcctcagcctccccagtagctgggattacaggcgccaccaccacgcccagctaatttttgtatttttaatagagacagggtttcgccatgttggccaggcctatctcgaactcctgacctcaggtgatccacctgcctcggcctcccaaagtgctgggattacaggcatgagccaccgcaaccagcgccttacttcttctgcaacctctctgacatctataattatttcaaaattaaaccattttggccgggcgcagtggctcacgcctataatcccagcactttgggaggccgaggcgggcggatcacaaggtcaggagattgagaccatcctggctaacacggtgaaaccccgtctctactaaaaatacaaaaaaaaaaaaaaaaaaaaattagccgggcatggtggcgggcacttgtagtcccagctacttgggagactgaggcaggagaatcacttgaacccaggaggcggagcttacagtgagccgagattgcaccactgcgctccagcctgggcgacagggcaagactcagtctcaaaaaaaaaaaaaaaaaattaaaccattttttgaaaaacttactgacacagctcacatgacatttctgttggggagcacccacagatattgctgaacggctgatggctaggcgaacggaagtgaggatgggaagaagggtccaaggtcatgcattcatttatttaattacccgaaaaaagctggaggttgaaatttttttttcttttgagatggagtctcgctctgtcgcccaagctggagtgcagtggcgcaatctcggctcactgcaacctccgcctcccgggttcacgccattcttctgcctcagcctccagagtagctgggattacaggcgcccaccaccacacccagctaattttgtatttttagtagagatatggtttcgccatgttggccaagctggtctcgaactcctgacctcaagtgatccacccaccttggcctcccaaagtactggggttttaaacactacagccttctgggtatctcccacacagaaaggcttcaggaaaccgggctatggatcttgtttttttattgttgtggttgctgttgtttgttttttgagacagagtctcatactgtcgcacaggctggagtgcggtggtgcaatctcggctcactgcaacctctgtctcccaggtccaagtgattctcctgccttgacctcccgagtagctgggattacaggcacccgccgccacgtttggctaatttttgaatttttagtagagacagggttttgccatgttggccaggctgcttttgaactcctggcctcaagtgatctgcccaccttggcctcccaaagtgctgggattacaggcacgcacctggcctggtttttttttttctttctttcttttttttttttttttgagacagggtcttactctgtcacccaggttggagtgcagtggcacgatcacagctcccttcagccttggccttctgggctcaagtgatcctcccacctcaggctcccgagtagctgacacaacaggcatggaccaccacacccagccaactttttgtatttttctgtagagacggggttttgccatgttgctcagctggtctcaaactcctggcctcaaatgattctcctacctctgcctaccaaagtgctgggatcaaaggcgtgagccaccatgatcgacctaggtctcattctgaggcccccatcagctcagaaccagcgttggcctcccaagaatataaaaagagtcccagggtgccactcacttaccctgctcggggctctctccactgacagattgggaatgggataaagagaaagaaggagaaagaatgaggcgtttgtatccacggcgccagagggtacagccctccagtttataaagccccccgcccccaccaccccactcagagtctctctacccttccaacacccttgcaagtggtggattatccctcccctgcattcagatcaatgcccagagagggatagtgacttgcctcaagacacacagcccattgggggtgatgttgaaccccagggccttgcagccgctctcattgatcccctcacactttacgagttggggtcttgctctgttgcccaggctggagtgcagtggcccagtcacagttcactgcagcctcgagttcccgggctcaagtgattgtcccatctcagcctcccgagtagctgggactccaggggcatgccaccatgcttggcatttatttatttatttatttatttatgaatgagacagagtctcactctgtcgcccaggctggacttggctcactgcaacctctgcctcccaggttcaagcaattctcttgcctcagcctcccgagtagctcagattacaggcacccaccaccatgcccagctaatttttgtatttttagtagagacaaggtttcaccacgttgaccaggctggtctcaaactcctgacctcaggtgatctgcccgcctcggtctcccagagtgctgggattacaggcgtgaaccaccgtgcctggctatctatttttatttatttatttatttattttaatttttttgagacagagtctcactctctcactcaggctggagtacagtggcacaatcttggctcactgcaacctccgcctcccaggttcaagcgattctcctgcctcagcctcccgagtagctgagattacaggcacccgccaccactcctgcctaattttttttgtatttttagtagagatggggttttcccatgttggccaggctgctctcgaactcctggcctcaggtgatccagccacctcggcctcccaaagtgctgggattacaggcataagccaccatgcccagcctgtgcttgactaatttttaaatttttcatagagatggcgtcttgctatgttgcttgggctggcctctaactcccggcctcaagtgatcctcctgcctcggcctcctaagtacctgggaatacaggtgtgcaccatcccacccagcaaatttttaaatttttgtagagacggggtctcgctctgttgcccaggctggtcatgaactcctgggctcaagcgatcctcccgcctcggcctcccaaattgttgggattataggcatgagccacttcatcccctcacgctgatgtttgctaccctggactgccagtcgtcctccccagccccgtctccccagccaatgccaccccgtgctgcccactcacctctggacccctcggcctccacgcccgcacggtcctccttgacagccgccgccagctgagcctgggcagccagggctccagacagagcaagcagccccgtagcactgccgcccaccagcccggctgggcggggggtgaggggcacagggggtgcgtggtgggacagcggctggagctgctgctgctagaaaggaggcaggatgggccggggcggggggcggcaggagcccagcggtccccagcccaagaggtagacacaggggatgggacctaagcacagcatgtgcccctggggttcccaggaccactggagccaaggcccacacaccaccccagctttaacacctcctgggtgggtgccagggacctgggagtgggcgtctccccatggcggggcaggggctagagagactcaccccgatgaggctgttcagctcccccacggtgacctgcttggcgcgttctacggcctggagcacctgctgctgatgctggcgggtggaagggatcaggtagagggtacattgagcccctgctcatgctagcggtgcccttggggacctgacctctccccgccaccctctcatctttgccccggtacttcccatttctcttttatctttttccctctcactctctccctttccttttggaattttgaaataagcacacggagaaagaaaccaaacctaagtgcaggtagaatagttacaaatcaggccgggcatggtggctcacgcctggaatcccagcgctttggaaggctgaggtgggcagatcacctgaggccaggagttcgagaccagcctggccaacatggtgaaacacctgtaatcccagctactcaggaggctgaggcaggagaatcgcttgaacccgggaggtggaggttgcagtgagccgagatcgtgccaatgcattccagcctgggtgacagagcgagactctgtctcaagaaaaaatatatatatattacaaatcacagtctctcctttggagcatcgaagaaccaaagacatctggggctggattgttctctggggcggggctgttccaggcactacaaggagccgagcagcatccctggcctccacccactccatgccaggggcacccccagttgtgacaaccacagacgtctcctggtggtaaaactacccccaagaaaaaaaaaacactgtgataaatcggcaccatggacccttctcctaggttaaggaacagaaagtaccagactccaggggccccctacactccctgccatcagaacaccctccctcctccaccttcatgacaataatttctttgtttttctgtataattctgcctcctacgatcgccttcctaaacctgcgtggatttgtccgttttcaactacgttgtgggctcattctctgagttctctttggcatctggcctctcagcataacattttaagcttcttccatgatgtggtgggtggcggcagcatattcagctttcagagctgtgggactctgctgcgagaaaatgttatatctgagccgggcgcggcggctcatgcctgtaatcacagcactttgggaggccaaggcaggtggatcacttgaggtcaggagttcaagaccagcctggccaacatggtgaaaccctatctctactaaaaatacaaaaaaaattagccagacgtggcggcgggtgcctataataccagctactcgtgaggctgacacaggagaatcacttgaacccaagaggcacaggttgcagtgagccaagattgcaccactgcactccagcctgggagacagagtgagacccagtctcaaaaaaaaaaaaaaaaaaaaaaaaaaggggggggggtgctgagcgtggtgactcacacctgtaatcccagcactttgggaggctgaggcaggtggatcacgagatcaggagttcgagaccaacctgaccaagatggtgaaaccccatctctactaaaaatacaaaaattagtcaggcatggtggcatgcacctgtaatcccagctactcgggaggctggggcaggagaaacacttgaacccgggagttagagattgcagtgagccaagatcgtgccatgcactcccgcctgggtgacagagcgagactcagtctcaaaaaaaaaagaaagaaagaaaatgttgtatttttgctgttccacacagaagccactggccatgtgtgtggccaccaggcatttgacatgtggctggtgcaactgatgaatagaatgattaattttattaaatttaagtgaatacaagtttaaatataaaataaatttaataggcttatttttatttttacttttttgagacgtagtctcactctgttgcccaggctggagtgcaatggcatgctcttggctcactgcaacctccgcctcccaggttcaaacaattctcctgcctcagcctcccaagtaggtgagattacaggtgcgcaccaccacacccaactaattttcatacttttagtagagacggggtttcaccatgttgaccaggctggtcttgaactcctgatctcaagtgatttgcccccctcagcctcccaaagtgctggtattacaggtgtgagccactgcgcccagcctaaatataaatttaaatataaaattaacttaatagatttcaggtcgggcgcagtggctcatgcctgtaatcccagtactttaggatgctggagtgggaggattacgctagtccaggagtttgagaccagcctgggcaacatggtgagactccctctctgttacattatacatatatacttatttaagccggagtctcactctgtcgcacaggctggaatgcagtggcgtgatctcggttcacgctaacctccgcctcccaggttcaagcaattctcctgcctcagcctcccgagtagctgggattacaggcacctgccaccacacccagctaatttttgtaaaaaaaaatttttttaggccaggtgcggtggctcacgcgtgtaatcccagcattttgggaggccgagccagatggatcacctgaggtcagtagttcaagaccagcctggccaacatggtgaaaccacccccccaccccatctacaaaaatacaaaaactagccggcatgatggtgggtgcctgtaatcccaactactcgggaggctgaggtggaagaatcgcttgaacccaggaggcagagattgcagtgagctgagatcgtgccattgcactccagcccgggcgacagagcaagactctgtctcaaaaaaaaaaaaaatttttttaaggaaaaaaataatagatttaaatattattaatagttaacctaagtgtaaatgatcacacggggctggtgactgccgtgtaggatagcggaacagtagtatattccactgtatgcactctgaggctgcttgtgtatacacgctcctgaagacagacatctgggctgtctccaccaaggaggtatcaggatgcggatacagagctcccatgggggtgcacctgtgtgtgggtgtgtgtaggatgggttggaagactttctagaaagggccagagagtgaaaacattttccctctgcaggccagaggtctctgttgcaactaccaaactctgtcactgtaatgggaaagctgctggaaatgatatgtacatgagtgggcgtggctatgtcaataaaactttatttgcaaaaacaagtggaggggtggagctggccctcgagctgcagtttgctaattcctggaaatgtgtgccttactcattcctttcaacagtcattttacctaatcttttttttttttttttgagacagaatctcgctgtgttgcccaggctggagtgcaatggtgcgaactcggctcactgcaacctccaccccccgggttcaagcaattctcctgcctcagcctcccgagtagctgggactagcccagctaatttttgtatttttagtagaaatgaggtttcaccatactggccaggtgggtctcaaactcctgacctcatgacccgcacgccttggcctcccaaagtgctgggattacaggcgtgagccactgggctcggcctacctaaacttcttgcggctcttgcctttctctagaccacctcgtccccactttccgctgcagatgctctttatgttctgtgtctacacaggacctctccccaccccaagcttccagaaatctcagactcagtggaatctgaacaaactgagcatctcccctctgggtttggtcctcaaggcatcaaggatcctcccagtgtatccactctgaagtagaactatctttcacgtctctctgaagagagaacgtaccacacagaaacagggacagtgcaggctgggtacagtggctcacacctgtaaacccaacactcggagcctgacacgggcggattgcttgagtccgggggttcgagaccagcccgggcaacatagggagacccgtctctactaaaaatacaaaaattagccgggcgtggtggtgcacgcctgtaatcccagctactcaggaggctgaggcatgagaatcgcttgcacccaggaggtggaggttgcagtcagccaagatcatgccactgcactccagcctgggtaacagagcaagaatccatcacacacacacacacacacaaaagaaaagaaaaagaaaaaagaaacagggactgtgcaaaggtactgaggatgaaaggaacctggggcactctcagaagagctaactttttttttttttttttttgagatggagtctaactctctcacccaggctggagtgcagcggcgcaatctctgctcactgcaacccccgcctcctgagttcaagcaattctattctcctgcctcagcctcccgagtagctgggattacaggcaaacaccaccatgcccggctaatttttttttttaagttttagcagagacagggtttcaccatgttggacaggctggtctcgaactcctgacctctggtgatccacctgcctcagcctcccaaaatgctgggattacaggcaggagccaccgcacctggccgaattacagtccattttaaccatttgtaagtgcacagctcagcagcataaagcacacacacggttgtgcagccatccccagcaccatctccagaattttcccatcttcccaaactgaatttctgtccccataaaactctcactccccgtcccctccccaacccctggcaccccccattctgctttctgtctcagtgaacctgacgaccctgggacctcctaggagtggatcacccagtgtttgtccctcagtgacttcttctagcaagacggtagggttaactttcatcaggtgctgagtaagcgtacccatcatctccagcaccctgggtgtatgagctcatctcaacttcacacctacgctactgaaaaaacagagacaagtgtcctgcctgaggccacacagccaggattcagacccaggcagccaacttgcagggcttgagggggtcagctctatgccttgcttcccatcaagggggaaaacagcccccagtcctcaccctcagccaacacctccctccatccctgcagcccctgccccagcgggatgcctggcctcagggctgcgggactactgcagtgaaaatggtctctatccgtgctgcaggctacgcggcagaatcagtgcctggggcgtcctcgcccagacctaccccctcccgtcttcttccggctcccttcccctcctccccccacccccaggcccactcacctcctgggtcaggaaggggataatctgagcgcagataccgctcagacgcttcacaatctccgcctggcaggaagcaatgagaggaagcttggagcggggtagagatttgcaacccagctctggactcccaggcggaccaggtgttggcaaagccgaagggttggggaggtgacgcccgcaggtgcacagagggaactcaggctagcatggcatgggccgaggtgggattcagagccccaccaggctgcgtgctcagctgagcgaggcccagggtggcctggagctgggaagaccagggctgaggtcctacgagtcacagatacaccacccgccagacgcacacccgccagggatttgcaggaggcagacgctcagacacccaactcagacgcagacactcagaggtgctgggctcagctgaaacaaaggaaaggggcctccgcctggagtcccagattccagccccggcttggcccacgtctgtcccaggcaaggcccctttcttggtctcctccgcttcccaggactgatctaccagctggggatgcctccaggtggagatctcagcacgccacactcaagggaaggatttcatctggagagggtctgggcccaggtgccccaaagaggctgagcagacgagaaggcgtgtgggtggggaagggggcgggcatacaatggccacggactttgcctctgcctgagttacaggtgtgctgtgtgtctggcgaagtctgtgtctcctattcccaccaggagggtggaactgggatcccagggtgtcccgcaccccataaaggggggtctattgcgtggacccatgggaccacgccatgcttcagcagacaagccccctcctgcccacatcagaaccaacagaacccccacacatgcaggaaagcatgccagggtgggcaaccccaggcaccccacactcccagcccacccccttctccttcccagccaccgggaagtcccaatacaaggttctgctcattgattctaatattctgatagaatctaggagcccatgaagctcagaagtttgggacccctctcatccctttagaaaccactggccagtctcaggatctcaggattaagcatggaccactaaagtcaattttagaatctttgggtctattggccgggcaaggtggctcactcctgtaatcccagcactttgggaggccgaggcaggtggatcacctgaggtcaggagttcaagaccagcctggccaacatggagaaaccccgtctctactaaaaatacaaaatattagccaggcatggtagcaggcgcctgtaatcccagctcctcgggaggctgaggcaggagaggcgcttgcactcaggaggcagaggttgcagtgagccaagatcaggtcattgcactccagcctgggcaacaagagtgaaactttgtctcaaaatttaaaaaaaaaaaaaaaaaaaaaaaatctttaggtctatctcagaaccttgagatcagaagttcgggaatagcctcagaaccttttaacacatctcagcacatagatatgataatcgcagaaccctgaggtctatctctgaaccctgaggtcaatctcagaaccctgaggtctatctctgaaccctgtctatctcagaaccctgaggtctatctctgaaccctgatgtctatctcagaaccctgaggtctatctctgaaccttgagatcacaagttcaggaacacctcagaaccttttaacacatctcagtacacagataggacaatctcagaaccctgaggtttatctctgacccttgaggtctatctctgaaccctgaggtctatctcagaaccttgaggtctatctcagaactctgaggtctatctctgacccttgaggtctatctctgaaccctgaggtctatctcaggaccttgaggtctatctcagaaccctgaggtcaatttcagaaatttgaggtctatctcagaaccctgaggtcaatctcagagccctgaggtctatctcagaaccttgaggtctatctcagaaaactgaggtcaatctcagaaccgtgaggtctatctcagaacactgaggtcaatctcagaaccctgaggtctatctctgaaccttgaggtcaatctcagaaccctgaggtctatttcagaaccctgaagtctgtctcagaaccttggatcacactgagaagctccagaagaggctcagagccttacgacactggagtcaatctcaaagccctgaagacagccacagagttttgaggtctattttggagtagtggggtcacagtctgaaccatggcatcaaattcagggcctggagaacaatcttggaaccttccagccaatcacactgagaccaatctcagaagcttcaaagcagcaacagaacctggggtccatctcaaaacttcagactttctgggttgaaagggacctctaagagtggccatccagctccctcctaggacagaagtcacttccacagcctccctggcctggctgccctgcctctgctatgtgccctccttgatggggatgcctggtggcccctgcccactgcctgcatctctgctggacgctccaactgctagatactgtcttcagaaggtgggactcattttccttccacgaggctgaaatctgtcttcctggtcccagatgggccctctgtgacctctgcggagatttcaggatgagacccgtgttccctaggtctgctctggccccggctgcccactctgggtccttctcagggcttccagacccccaccctccctcctgaacacgcgtaaccccaacccagttacctgcttatgcatttcaatgttgagcccgtacgacatctcataatactgcaaaggaaaaaccaagtaagaacgtctagggtggagatgggtgccctcctccagataggtgatgccagggtcttccaagagtccccaggttcaggggaatcacagcaggaagcagagccccccccagctccacggggtcccagaggaggaagcgggggctctgcctggaagggccccctctactctccccagagaggcagggcaggtaggaagtgtccagaggccctggcccgacagagactcccatcaggcgaggggtcctccctgtctccccattcccagagctgggaggaccctcctagagagcctgaaatcccaacctgcccaatgtacagacggggaagacgaggttcggagtggggcagggacctaccccagagtccaccgtgactcaaagccctgcccgcctctcccctcaccctggcatcataagtgccctcaccatgacataatgtcgctgcatttccgtcttctcgctggccagcttctcacattctagcttgaggctgagaagaagagagagggcaaggggctcccacccgccccatgtgggccggcttccaaagtgagaggctggatctccccctcccgacttccttacagacctccccccacctcctgtcccagtccctccccgccccttcctgggctccaaatgccccagctctgactgtccccagacccctctgcacctgcgcttccacctggaggcctttgtcgcgccccccctccaaccgggagcccctcctccccgccctataccccggaggcctcgccccgccccggcgcccaggtgaactcccgcggcccctggggcggcccccctcacctgtggtattgagcctgaagaaactggaattcttctttgatgcggtcgcagatctccaagatcgagaacttgaagggctggccggactggagcggggtctggggggggtgtgggggaaacgtcagggtctgagttcccggacactgggggccccctccccgcagtccgcactcaccgggtgccttccctgggggtacatcctgccgatccgaaaagccccccaggcgccaccagagcttgatgatatggaggcggcaagagtgggggaggctgaagtggggtggtggggaggctgcccgaagaaagagggaggagggagaagcggcgcggggcaagggaccctggagtccctggcgcgcccccaagcgcgcgcgcccggggtcgtgggagcccctccccgggttggggtgcgcggggcgagcggggcgggcaggggcagcggccggggcgggagcgcggcgagggcggccgcggcagccggcgcagaaggtcgggcgcgccgcggccgggtttcggtggcggcggcgcgggcggcgggccccgcgcggagccgcctccctccggcggggctcggccgggagccgcgggctgagccgccttaaggtggcgccgccgcccccacgcgcccgcggcccgccccgcgcccacccccgcgcaccgcccctccccgcgcccgcgccccccccggcccccgggcacccgcccccttccttcagtccctgggccgttggggaaactgaggccgggtggggaggcgcccagtgccttaaaacagggtccccaccccctcccggaggggcgggagaagaaaaaccagtgaagaaattcacaccgtgttacccaccgtgggagcgggggggggggcttgcggggagcggggaccagtctggagtcggaaatggcttttctgagcaagtgacattgggttgagattgaagggtcagcaggacgcagccttgccaagcgctggcagggaaccctgccagaaagggaatctcacagcaaacactgcttcccagatcatgccgggccctcgccctctgggggcctcagtagtctctgcaaaaggtcaggggtggtgcgctatctttagggtttaattttttgcagagatagggtctccctgtgttgcccaggctggagtacagtggggcaatcatggctcactgcagcctcgaactcctgggctcaagcgatccttccccctcagcttctccagtagctgggactacaggtgtgcaccaccacgcccagctaattttttaattttttgcagagatggagtaggggggcgtctcactatgttgcccaggctggtcttgaactcctggactcaagcctctctcttcggccttccaaagtgctgggattacgggcgggagccaccgcactgggcactgcacttaaatgagatagtgcatgaacgctgtcagcctctccctacacagagcaaacttccacagatgggaattgtgttcctactgccatcaccagtggactgggctgtctcccctctcagactgggtttcttgaaggcaggagccgtgtcccactcagaactggaagaaccacagctctgccatcagactcaagtctctcccacggcaaaggctccagccccgaccagagaccacagacatccagccagcatccttcaggcccacccggggagtgggaagttcttattctctttggagaaacctcaggagaggtttgtgaagtcaatcaacaaacgtgtactaaatgcatactgtggaccacacactgctgtagacactggggcacagctgggaacaaaacagagaaaaatccatgccccttgatgacacttggacttgtgtccttaggtgatcgagtacctaatggtacctaagggttagggttacaaaaacccattttgtacccttacaaaagggcacaagagcccttatcaatgggccaggggtggtgggtcatgcctgtagctccagcactttgggaagctgaggagggaggatcgcttgagcccaggagttcaagaccagtgtggacaacaccgcgacaatacaaaaaaacatttttgtgttttttgtatctctacaaaaaatacaaaaataattagccaggcatggtgatgcacacctgtggtcccggctacttggggggctgaggcgggagatacctgagccccagaaggtcaaggctgcactgagttgagatcacatcactgcactccagcctgggtgacagagcaggaccttgtctcaaaaaaaaaaaaaaaaagcccttatcaaatttaaagccatcgttttccagcccacagatatttacagagcacctatgacgtgtcaggcatccttccaggcacagggattgtaagggtggataagggagacagatccctgccctctctgagtttgtgggatgtgagtgacaggctaggcaggttcacagcttggtaattatgggactatttgtacagacagaggaagagtttagagggcagtgatagagatgaacaaaagcaaacctgcttatgtggggtgtctgggagaggacccttgggggagggtagccttggagatgagacctgaacgatgaggttgggcagctctgggaagggaggaaaagagacacagcctgggataaagatacaattgtgtgtgtgtgtgtgtgtgtgtgtgtgtgtgtgtgtgtgtgtgtagtactcactagctccctattgccctcaaaataaatccaaactcatctctcttcccacaaggctcttcacaaaactcttccccttttccccttcaccatctctttatgttttgtttattgtttatagagacaaggtctcactgtgttgcccaggctggtcttgcattcctgggctcaatcgatcctcccacctcggcctcccaaagcactgagattacaggcatgagccactgcacccggccagccagcttcatgatctcaactccggtcattttcgccctcactcactctgcccaagtcacactggcctcacaccaggcacagtccagcctcagggccattgcactttctgttccctgtacctggaatgcttttcccttgcttcttatcattcaagtctcagctcaaaagctacctcctcagaacggcccctcctagccacccatttcaacagcttctgcccaccccgttattttcacactctccatcctattctccctctcttcccagctcctaccatagtgtgtggctttttgtttgtttttgtttttgttttttgagacggagtcttgctctgctgcccaggctggagtgcagtggcgcgatctcggctcactgctgcaacctatgcctcccgggttcaagcgattctcctgcctcggcctctggagtagctggtattacaggctcccgccgccatgcccagctaattttttttgtattattagtagagacggattcaccatgttggccgggctggtcttgaattcctgacctcaggtgatccacctgcctcggcctctcaaagtgctgggattacaggcgtgagctaccatgcctggccttcggtttttttgtttttgtttgttttgagacggagtctcattctgtcgctggagtgcagtggcgtgatctcggctcactgctgcaacctctgccttctgggctcaggtgattctcctgcctcagcctcccgaatagctgggattacaggtgcccaccaccacgcctggctaatttttatgtttttagtagagaccggctttcgctatgttggccaggctggtcgcaaactcctgacctcagatgatccaccctccttggcctcccaaagtgctgcgattacaggcttgagccaccgtgcccagcccacagtgtgttttggatgtgagtatgtttactcggaggttgttcgcgtccttgtttgtctccctcaccacgaagaaggctgtggagggactgagcctgtctaggtctctgcggggcctggcacacagtaagtgctcaataaccagcctaaagccagaaaccgccggccacactccctgcttggaaattctcacaaacagggagcgccatcattctacgctgtcaagagtccgtgattccaggttcttgggggtctgtgaagtgctgattccaaaccctttccggcaggtgtttcactgctcctgggaggccaacatctcccctgcctggaccttgagcatacatggtagcctctgtcctcattgtctgcaactgtccaccccacatcttccttcttgttggttgttttttttttttgacggagtcatgctctgtcgtccaggctggagtgcagtggcacgatctcggctcactgcaacctccgcctcccagtttcaagcgattctcttgcctcagcctctcaagtagctgggattacagatctcggctcactgcaacctccgcctcccaggttcaagtgattctcctgcctcagcttctcgagcagctgggattacagacatacaccaagcctggctaatttttttttttaatggagtctcactctgtcgcccaggctggagtgcagtggtgccatctcagctcactgcaagctctgcctcccaggttcacaccattctcctgcctcagcctcccaagtagctgggactacaggcgcccaccaccacgcccagctaattttttgtatttttagtaaagacagggtttcaccatgttagtcaggatggtctcaatctcctgacctcgtgatccgcccgcctcagcctcccaaagtgctgggattacaggcgtgagccaccgcacccggctaatttttgtatttttagtagagacatggtttcaccatgttggccaggctggtcttgatctcctggcaggcgatctgcctgcttcagcctcccaagtgctaggattacaggtgtgagccaccgcgcccctccagatcttccttcttctgcctaagcccctggctctggaaacccaatggctccttcttgacctccattacaatgcttgctcagagcagcctcacctccctctgcggggctctcctgtccgggcggccctcttccctctctaagcacaggtgtggtggctcaaacttgtaatcccagcactttgggaggccaaagaggccaggagtttgagaccagcctgggcaacatagcgagacccaacccccaccccccatctctacaaaaagtaaaataacaaacgtaggtctctgtccttccttagcccggtcacttgaatgtcaacttgactcacacctctggcttccagggctctgagacaccgcctctccctccaggcttcagtgaccgcctcgtgaggatggctgcaagctctggcaccacctccggttcctactctgagacccagccctgtgggtccagccaccaactgggcatctcccctagaggtcccccagatctcagactcttaccccctgctcctatcagggttcccacacacatcccccagatactctaaaccagagcatcaccctagccctctattcccaacacctggcctgcaaccctcctccgttctccccaccccagcagcccccaccctgaccaggcctttgtcctctctcccatctggaccacagccacctcctccctctgagcagcctttgtttttggtgatcttcaattggagcctggccctccttccctcaaaccctcccctggctccctattgccctagggataaatttccagctcttcaccctagcactggaacctctgcaaccctgccccagccagcttcaccttcctccaccagatcacaccacacccccaaccccctccagccaccctggccagatcacctaatttgtgtcctttctttcccacctctgagcctttccctgcttgttatctcttcctggaattccctccccctccttttatgcctggagaaagtccatttttttcaaggcccaacccaaaaactgtctcctgcaaaagccttctcccccagcctcctgtcttcttcgcctcctgtcttctccatacgcgcgtacacacacacacacacatacacacactggatataaactgcttggtgttggtggataaatggatgtttagtctacgaacacctccacatgctgcaagaggctggattcctagagaagatccagccctaggccttccagggaggggctcccagagcatctggtggggacagaggtacagggacacgtaccctcccagggtcacatagggtcagtgtcagcacaggagcgagctaaggatgaaggcagagccgggcgaggaacaggggcattgcccggtgagtgagctgaggctccctagagcaggggatctttacccagcagtcttcagatccctctaacaggcacactgcaccggggagggtaaatacagatttgtggattgcccgagaagccacaagaccacacacgcacacaggaacacaccccatcccttagtgtgtgatccgccaggaaggaggagtttttgctctgggcagcaacatccccaactttgggagcagcgggtggaatttggggagactctgctgccagcaactgtgtgcatactggggaacccttggccgcctgtgactccataactccccaaaataccacatccggccagagcaggaagcagggaagcaacctgccaggcgtgttccaacgtgggtagagtccccagcgacttcatttgccacgcgggacttcacggaccccctctttgcgcctcagtttccccagctgcaccatcagggaagaagctgccagaggggaaaaggagctcagccgccgatctcccccttcccattacagagaggctcagcccctggttcctggctagggttttacgttgtggatgtgggtttacggaaaaaaaaaaaagggaaaaagctgagaagctgcgctgggaccccggattgctcagaccaccttaaatcagcctggccgccccagctactgtggaaattcctttctccgcggtggttggctgggggcgccagccaatccgctcgcgacgctcccacatgggtcagtgacgtcacataggaaactggccaatggggattaggagaccagcaaccaatggcaggaggcactgggatcagtagggccaatcggaaggcagctcggcgctcccggcggggtttggcgagtgtggcccccctccctaggagaatctgagaccctagtggacgcccgagctcgaccggattggaggagggggggctaaggctccattattatccagaaacaggggaaagcgagtcacccccaagcctggcctatctccccttcaaaacaagggaccctcgtgcaatatgctaccagctagctggcggagcagaggttgcatctttctccctatttcacagataggtaaactgaagcaaagagtagttaagtcacgctggacgcccggcgaagagctgaagctcttacccgagcctgggggctccaggaacggtctcagttttacccccaggtgggggggatgggcctataggtagtcaggggtggaggggggtggtgctgggccttgtgcctcagtttccccgagcgtggaagctggaggagagcacgggttttcagaaaaagactacgattcccagaagctcccgcgcggctcccgcccaggctgtcaatcaaagtaacgtgggtacctctccggcccgcgctctcccgcccgtcgcctccctcccgccagctcccgctccctccctgccggctcccggcccggcgcggtataattacagcccattgatccgacccgggccgggaaagcggctccctcggggaggccaagcctttggcttccgacaccgccaacctctgcctaccgccccctccagccgaactgccgggccaccagccaggcctgtcccctcccgctggccccgggctcgcgggtgacctctgagcctcagctccccgccacgcttggcggtgtgccccccggaaaaatcacacacacatttccttccacccaggaacatgaggagccatctccctagaacctccagggcctctctttgagcctcagtttacccagatgcacagtgagattgctggacaaaactttcatgaaacccatactccgtgctgttctgcctgggagcagccagggctgaccttggtggaaactcaaggaggggctcccaagtttgggaggagggggagacagcccagctctctcagaacccctgtggtcggggttggggttagggaggatcagagctgggggtgggagtgggggcaggctcagccaggatttagcgcccccattgggaagttgggatagctttctagatgttgggtggtagtatttaatagatgttggggcagggcgtggtggctcacgcccgtaatcccagcacttcaggaggccgaggcaggcggatcacctgaggccaggagttcgagaccagcctggccaacatagtgaaacccggtctttactaaaaatacaaaaattagccggacatggtggcacgctcctgtagtcccagctactcaggagactgaggcaggagaattgcttgaacctgggatgcagaggttgcagtgagccgagttcgcgccactgcactctagcctggacaacagagtgagactctgtctcaaaaacaaaaacaaaaacaaaacaaaacaaaaagatgttgggtttcggtatttaagctagggttttgcagaatgcataggagttgcctcatttgagcagtgcctttagattaccctaaccctaagtggacagaagaaagatggggcagccttaagccctttcctgtgacagagtgagccttgggctctgacccctagctttgctgtgtggatctgggaacatcccccagctgtgaagtgtcggggaggtagataccccctagggttagaaggcccctgtgcctactttcgcatgggtcctgaagtcacagtgggttctgaccagcaggagtcagggcctgggagcccgtggtaggaggcactaggattggctgaggggctcaggaactccagcctctccctgagtaagaactgggcggctgggggagaagtcccagagtgacaacggctcagtgccaggcacgtttactctgcttgggtttccttgtctggaacacaagattaataatagaatcttcaaataaggcctataaagtacttacaataatgcatagtaggccgggtgcagtggctcacacctgtgatcccagcacttagttgggccaagatgggtggatcacctgaggtcaggagttcgacaccagcctggtcaacgtggggaaaccccatctatactaaaaatagaaaaattagtcgagcaaggtggcacacgcctgtaatcccagctactcaggaggctgaggcaggagaatccttggaacccagaaggcggaggttgcagtgagctgagatcacaccactgcactccagcctgggggacagagcgagactctgtctcaaaaaaataataataacaataacaataataataatgcatagtaaatgctccataaagggtagctatttgtactcccaacatttattttgtccttattattatttgagacaaggtctcactctgtcacccagtctggagtgcagtgccaccgtcatagctcactgcagccttgacctcgctgggctcaagccgtcttcctgcctcagcctccggagtagctggaatcacaggtgtgtaccaccacactcagctaatttaaaaaaaatttttttgtagagacagggtctcactatgttgcccagactggtcttcaactcctgggctcaagcagtcctcttccctcagcttcacagagtgctgggattacaggtgtgaaacactgtgtccagcccccactatgtcctaaagggtccttctctcccactctcccctcacgctccacatctatgctatgcattctccattgcacccacatccttgatgatccattgaaatgtgaatcagggctgggcgtggtggctcacgcctgtaatcccagcactttgggaggccaagatggagggactacctgaggccagaggttcgagaccagcctggccaacatggtgaaaccctgtctctactaaaaatacaaaaattaaggccgggcgcagtggctcatgcctgtaatcccagcactttggaaggctgaggcgggcggatcacctgaggtcgggagttcaagaccagcctgaccaacatggagaaaccctgtctctactaaaaatacaaaattagccagggtggtggcgcatgcctgtaatcccagctacttgggaggctgaggcaggagaatcgcttgaacccgggaggcggaggttgcagtgagctgagatcgcaccattgcactccagcctgggcaacaagagcaaaaccacgactcaaaaaaaaaataaaaattaaaaaaaaaaaattagctgggtgtggtggcgggcacctgtagctgcttgggaggctgagacagaattgcttgaacccgggaggcggaggttgcagtgagctgagaccgtgccattgcactccaggctggccaagaagagcaaaactctatcctttccccactccaaaaaaaaaaaaaaaaaaagtgaatcagagtccatccctcccttgctcaagaaccttccatagctccctattgccctcaacataaaatccaaactccctacctctgtctatgtgatctgacttccatcgcctccctcctctcacctcctcccacttctccccctctgttccagccacacaggccttctccctcttcctcaaaccagagtctagcctcaagacctctgcactgcattggttgttccctctgcctgaaccacggccagcctttctcttcctttcagatcaaacatcacatcctagagaggccagcctggctagagtagctcccctcctcctacctgctcagcttccctcagtcttccgaggcctcgtggctctgggaacacatactatctgctccctcctgtgtgtacggtctgcccaggccccaacacaccaccggctacactgtatttattgggagagtaagtggacaagcccatagagggatagagcctcaccaaggtcacccagcatgacggacgcgatgccaggtcccctgctaacctgcccagcgctaacacaacctgtaggggtcagctgagatcgcagagatcacactacctccagaggctgtgagacccagtgtcactgatgtgcaagcctgggttcaaaccccacctccgccactgcgtcactgtgatcctgtacagtgggataattatagaaacgtctcattgagtcatcacacgatcaaatagctcgatagatgaaaaggccccgaccgttattattgtgtgggagtgtgtgcggcccagcggggacaatttggggtgcggaagcagagctggggctggcaccacagacaaaccccatttttaagcccctagggccttctggtcattgcagcaaccccatcacccacaccacgtgtaacccctctgtacccagttgggggttcaccctcctaggatcgccatggactcccgtctctatctccaccctccctccttccctggagagctcattgctgggccccaaactcgcccagcctggtccccctggaaggcacagcacagatgggggttgaacaaacccctggccgcatggcccaatctgaatcttctttttaacgtttgtttgttttttttttaagacagtctcgctctgtcgaccaggctggagtgcagtggctcgatttctgttcactgcaacctccacctcccgggttcaagtgattctcctgcctcagcctcccgagtagctgggactacaggtgcacaccaccatgcccggctcatttttgtatttttagtagatggggtttcaccatgttacccaggctggtttcgaactcctggcctcaagggatcctcctgcctcggccacctgaagtgctgggattacaggcgtgagccatctcacccggcacagcattttgttttttgttattgttttaagacaaggtctcactccgtcgcccaggctggagtgcagtgacatgatcacggctccctgcaagcctcgagcaaaatcctcccacctcaacctcccaagtagctgagaccacaatcgtgcaccaccacgcctggctcatttttttagattttgtagagatggggtcttgctatattatcgacctcaatctgaatcttcctcatccagtttctggtttgcagtgagaccttttaacccctgtggacctccgtttgctcatctggaaaaggggcatggtactgtcaccaaccccagagtggcccttgatgacagcctctgctgccatttatatatatatatatatatatatttttttttttttttttttttttttttttttgagacagagtcttattctgtcgcccagactggagtacagtggcgagatctcggcttactgcaacctccacctcccaggctcaagccatcctcctgcctcagcctcccgagtagctgggattacaggtgcgtgccaccacgcctggctaatttttgtatttttagtagagatggggtttcaccatgttggccaggctggtcttgaactcttgacctcaaattatccacctgcctcagcctcccaaagtgctgggattacaggagtgagcccccgcgcccagcctgccattgctattatcactgggctacctggttgatatacacaccatggccctccgaattatgggctgagagcttgccctgtgatgggtacagtgccgcctccaggcttcgccaccgggattccctctgcctggagcacccgcccctccctgagagccacctcccaacatgggctcttgctgtcaaaccctcctcggctcaaatgtcacctcctcagagaggcctcccctcctctcctgggccaagcagccccgtctctctctgtcaccaacccttgctagatttttcttcctaccacttggtgttctctgcaatggtcttgacctattttccaaaccttccccatgactctgtgagctccacgagggtcgagaggcgctccgtctgggtccgtgatacccaagcctggcacacagtaggcgcccaataaatacaggaatgaaaggcccgctgctgccccaggttggtttttcttccccaccaatccagttgctgggaattgaggctttgggggcagccaggcccagagaggcctagggacctgcccacggtcacacagccacgcgctccagctgggagctctgtggctgcctttgcggggggccccgagtcccagggttgggcaggcctagggcagggtcgcccgccccctcctcccgcggtgctgcgggggaacccaccattagccacgcgggcccggcccagcgtgttccccgacaggcccgggcaggcccagcaggggagtgaggggattgcggggagtagggggagcgcagggagcgtggggaccgcccctccccgggacccgagaagggggtgtaggagggaagaggagggggaggaggagagaatggaggaggaaacggagggacaaagggggaggcggcaaaggggaggggaggggagaggaggggagaggaggaggcccccgggtggaggggaccctgtggaggggcagggaggaagggggggcggtgaggtgcgggggaggggcagaggggcggaggtggcgggagagggagggggcggaggagggacgggctttcaggcctggcaggctcccagcaactgcgggaggggtaagggggcctgggaggacggtgggcctgggtgggtgggagaggtttgcagggggaggtcagcggctgggggcgggagcggggacggggatggtagggagggaggcgccaatgaagagatccagggaaggttaggggacccaagctggagactttgaaggacagagggagaagcccagagatggcagaaagagggagacgagaccatcagagacccccgagacagagggggcgaggcgagggagattgttggataatctgtttcaaacctgagttctatttgcttcatattaggggtttgtcccttctccccaagtccccagagatcctatgtagaagctgttctcattaagcaccaaacagttaagtccattctccagtactagctcggaagtcggtttcatattcgacttaacaatttaaatgaaaggaaattttttttaacggcagtggggacttggagaaggagggggacaaagacagacattacccaggagagaaagttagaggggaatcctaggccctcagaggggaaaccaggcaggggcggtttcagctcccttctctagtttttaattaatttattttttattttttagagacaggggtctcactgtgtggcccaggctgctctcaagctcctggcctcaaatgatcctccctcctcagcctcccaaagtgctgggattacagccatgagccatcttgcccggcacagctttttgttttttgttattgctttgagacaaggtctcaccgtgtcgcccaggctagagtgtggtggcaagatcacggctccctgcgaggctcaagcaatcctcccgcctcagcctcccaagtagctgagaccacaatcgtacactaccatgcccggcctggcctcaagcaatcttccagcctcggcctgccaaagtgctgggattataggcgtgagccatggcacccggccccttctgcagctttttttttttttttttttttttgagatggtctcgaacgcctaacctcgtgatccgcccgcttcagcctcccaaagtgctgggattacaggcgtgagccaccgcgccatgcctggcctctgcagcttttaatatcagaaaacatctacctgggacctgcatcatgggtcgcacctgtaatcccggcagtttgggaggccaagacgagcggatcatttgaggtcaggagtttgagatcaacctggccaacatggtgaaaccccgtctctactaaaaatacaaaaaaaaaaaaaaaaattagccaggcatggtggcgggcgcctgtagtcccagctactggggaggctgaggcaggagaatggcgtgaacccgggaggtggagcttgcagtgagccaagatcgtgccactgcactccagcctgggtgacagagcgagactccatctcaaaaaaacaaaacaaaacaaaaaaattagccaggcatggtggcgggggcctgtaatcccagttactcgggaggctgaggcaggagaattgcttgaacccagggggcagaggttgcagtgagccaagatcgcaccactgcactccagcctcggcgacagagcaagactctgtctcaaaaacaaaaaacaaaacaacaacaacaaaaatacaaaaggtagccaggcgtggtggtgcatccctgtaatcgcagctgcttgggaggctggggcaggagaatggcttgaacccaggagacagaggttgcagtgggccgagaccttgccactgccctccagcctgggcgacagagactccgtctcaccaaaaaaaaaaacaaaaacaaaccaaaacacctaagtggcacaggggcctcctcgtgactttctgcctcagtttcccctccagcctgcccccctggtgtcccatggaggatctcgataatcgcacatctgggtgtgccgcccctttgctgctcgaacaccatccatggctccctatgccccagctcctggcctgtagggcaggcaggattctacagggctggcccacatccacccatctcactggcttctctgccctttgctttttagagaaggattcccgctctgtcgcccaggctggagtgcagtggcacgatttctgctcactgcaccctccacctcccgggttcaagtgattctccttcctcagcttcctgagttgctgggattacaggtgtgcgccaccacgcccggctaatttttgtctttttagtagagatggggtttcaccatgttgcccaggctggtctcaaactcctggcctgacgtgaccctcctgcctcggcctcccgaagcgctgggattacaggcgtgagccactgtgcctggccttcactgccattttctcactttcttccctaatcgctacacacctactgtgtgccaggcatgattctaggccccaggatctatagtagaaacccaaatcagacaaactctcttcgccaaagtcatattagagtggagaaaagcagtggacaagagaatatttgttgggataaattgtgcggagcaaaaaatgctgtgaagataaagaatgcagggaaagccgggcgcggtggctcatgactgtcatcccagcactttgggaggccgaggtgggtggatcacttgaggtcaggagtttcagaccagcctggccaacatggcaagaccttgtccctacaaaaaaaaaattagctggatgtggtggtgtgtgcctgtagtcttggctacttaggaggccgacatgggaggatcacctgagcccgggaggttgaggctgcagtgagctatgatagcgccactgaacttcagcctggttgcccaggtgagaccttgtctcaaaataataaaaataaagaatgcaggaaaaagtgattgtgatggggatgactgaagtaggaacagcgtgttccaggcagagggaaaggccctacctgggaccatgcgtgaacaccttcagccacagggaaggtgccaggaagggtcagactgaggcagtgactacggggcaggggtcgtgagcctccaaggtcagccctgcctcagccaatcctgctgcaccccaactctgcctggaatcggtctttcaagtccttcctcctcccccaccagtcagtgagtccagaaacttctttctcttaaaccaaatggttaagatcctggctgggtgcagtggcttacacctgtaatcccaacactttgggaggccaaggcgggcggatcacttgaggtcaggagttcgagaccagcctggccaacatggtgaaaccaccccccaccccaccccgtctctactaaaaatacaaaattaaccaggtgtggtggcgggcgcctgtaatcccagctactcgcctgtaatcctgaagcaggagaatcttgggaggcggaggttgcagtgagccgtgattgcaccattgcacttcagcctgggcaacaagagtgaaactctgtctcaaaaaacaaccaatcaaatggttaagatcctgaatttcctgcatttgaatccagattccctggctctgtgaccacttagagcctcagtttccttatctgtaaaacagaccctccttcagagagaatcctttgagagatccaattttcactgtaccactcaagcactgctggaggcgtgatagatgttcaggacaacacagccggtattactgttgttatctttatgatatctttgccttcctaattagtctggttgcccctaggggggcaaagaggtccctgagcagccagcaggagactcagctacagccctgacttattcctgcccttgagcaatgttctgatgtccgtgggcctcagttttcccatctgcaccatgggaagagagcgggatcatttctagctccctaattccaccagcactgcaggtgcagcttttattttctcccccaagactgcctgaagggcacacagagggacggagaaggctcagctgcagacaattcagccagcgcaggcacctggccggcctgactgtgaatgtctaatgcgtcctagctttagctcctattccccgctccttttcctccacccctccccgcccccaaccgggctggggatggggaagggggattctgtaagtgctcccaccctctgctggaggccagagcctggccctttggggtgcagatggggggaaatggaggatttcagaccccggagtccccagtcccctgacagacacccccccaccccccaccccacctccgctagagtcctgccaccggggcctgtgggattctcctccctccactgagaaccattgtgtggatgggggcaatcgaggcccagcgggcaggggatctcctcacctgctggaacgtccctcagaatgggggaggggggctgggagaatggtggggtcggagaaggggagagccttggagaaggggcttccagaggaaacagggtgttagagcgggagaggtaaccagaaaggaatatgggcccaccccagtcctctctgctcccctctggtcccatccaaggagctgggagcatcgctgtgcctccccctcctccctctcctcctccccctcctctgcctccccctcctcctcccttccctccctccttctcccccaccttcctattcttccctcccttcctgctattttctctccctcctccctcccctcagttttctccccacgcccctccctctccctcccctccctccccctccctccacttccctcctctctctcctcccctcctccttcccctctccccctcctctccctacccccgcctccccgctgttctctcccctcccctccccctaccctcccccgtcctccgcctcattaggcgcggccgcggcgcggggcccattagccgatcaattagccgaggtcgcccgcggcgcagtcgttaagcgcggggcggccgcggcggggagggggctcggagcccgcgcctccgcccgcccgccccggcttcccggacccgagcacgcccccccaggacgcctcctgccacccgccccccagcgggccccgggaccctccccaaaccctgcgggggcctgggagacccccggatcgcaggccaggccgtggctgagtaggcaggaccccttcttccgagaagaccccttgtgggggtgtcgggcttgtgacccccccccaggcatccttctgctgccagcaacatcaatatcagtaatacttactattgttattattattattactagctgacactcttgagcccttgcagaagttctaattctcagtacaattttccagaaattgagatcagagcgtgacttcacttgccccgaatcacccctaagggtcggagatgaggagccccaagtaaatatgttggcattcctgcagttctttctatgtgtagatttcacacacaaaaacgcaacccacactccccgttccccgttctcctccgcctagtctttctctatcgacacacccgctgacacgccgtatattttacttgtttatctgttcaccccagccaggagggcggggctttctgtcttgttccctgctgggcctctgggactcagggtagagtctccacagacgaatgaatgggccgggctgcggtgtctctcgcctgtaatcctcgcactttgggaggccgaggcgggcggatcatctgaggtcaggagttcgagatcagcctggccaatatggcgaaaccccatctctactaaaaatacaaaaaattagccaggtgtggtggcgggcgcttgtagtcccagctacctcgggggctgaggcaggagaatcacttgaacccgggaggtgggggttgaagtgagtcgagatcatgccactgcatgatctgggcgacagagcgagagtctgtctcaaaaaaaaattaaaaaatgaatgaatgaatgcaccagcctctgctgtgagcactttccttggattaaaatggggtcttcctaacaaggatcggttctgtgattatacccattttacagatagagaaactaagccccagcgtggtgaagccacttgcctgaatcaaccagctgtgagaggaagagccaggatttaaatccaggctggacactccatgccgaggaacatcctaggacacctgtgccacttctgtgacagctgctgatgccttttgcactcagtttttttttttttttttttttttttgagacagagttttgctcttgttgcccaggctggagttcaagggcatgatctcggctcacttcaacccccacctcccgggttcaagggattctcctgcctcagcgtcccaagtagctgggattacaggcgcacgccaccatgcctggctaattttgtatttttaatagagacatgatttctccatgttggtcaggctggtctcgaactcccgacctcaggtgatccgtccgcctcagcctcccaaaatgctaggattacaggcttgaaccaccgcgcccggcctgcttttgttttttaataaagacagtgtctcgttctgtagccaggctggagttcagtggcgcgatcatggctccttgcagcctcaaactccggggctcaagcaatcctcccgcctcagcctccagagtagctgggactacaggcacacaacaccacgcctgactattttttggatttttagtagagatagggttgtgccatctcagccaggctggtcttgaactcctggcctcaagtgatcctcccaccttggcctcccaaagtgctcggattacaggcatgagccactgcactccgccttatttttattttttgtagagatgatgtcttcctatgttgcccaggctggtcttgaactcctgggttcaagtgattctccaatctcagcctcccaaagtgctggggttacaggtgtgtgccagcgtgtctggctggactcagggtctttgtgtgggaactggggtagggatgttgcgaaacccaccctgcttttggtgggtgagagtcagaggaggccttcagaaaagtgacttctagggagtctcagagaattagaatgcctgggaggggaaataaagagaaccctgttccaggcagagggaacagcatgtgaaaaggcctcaaggcaagggacagcaagatgtttcaccttggctgcagcctgttgagtaggagtgaaaggagggatgggtagggtctcctgggccgaggtgaagaatttcgaattaattccaagggcagtgagagccaaagataatctttttttttttttttttttttttgagacagaatctcactctgtcagccacgctggagtacagtggcatgatcatagttcactacagccttgacctctagggctccagcaatcctcctcactcagcctcccaagtagctgggaccacaggtgcacaacactatgcccggctgattctttttttttttttttgagacggagtcttgctctgttgcccaggctggagtgcagtggtgcgatctcagctcactgcaagctcctcctcccgggttcacgccattctcctgcctcagcctcccgagtagctgggaccacaggcgcctgccaccacgcccggctaattttttgtatttttagtagagacggggtttcaccgtgttagccaggatggtctcgatctcctgaccttgtgatccacccgccttggcctcccaaagtgctgggattacaggcataagccaccgcgcctggccataattcttatatttttgtagagatagggtctcactatgttgcttaggctggtcttgaactcccagcctcaagcgatcctctcaccttggcttcccaaagtgctgagattacaggtgtgagccaccaggagcagcctatcttttttcatgactgtgtagtattctgctgtgtgaccatgtcacaatccatctatttgattgggggcaattatgacaaattacagcagctctaaacactcttgttcaggtctgtttttttgttttgttttgttttgttttgtttgagatggagtttcactctgtcacctaggctggaatgcagtggcgcaatctcagctcactgcaacctccgcctcccgggttcaagcgattctcctgcctcagcctcctgagtagctgggactgcacggctgccaccacacccgactaatttttgtatttttagtagagatggggtttcactatgttggccaggctggtcttgaacccctgacctgaggtgatccactcacctcggcctcccaaagtgctgggattacaggcgtgagccaccgcgcctggccaattgttcgggtctttttgatggactcatatgacatttccgttgggagatggatccaagaggggaattgctggattatgtggtgccaagtggccttctgaagtagaggtaagagtttacccttgctggccgggcgcggtggctcacgcctgtaatcccagcactttgggaggccaaggcgggtggatcacgacgtcaggagatcgagaccatcctggctaacatggtgaaaccccgtctctactaaaaatacaaaaaaaaattagctgggcgtggtggcgggcgcctgtaatcccagctacttgggaggctgaggcaggagaatggcgtgaacccgggaggcagagcttgcagtgagccgagccgagattgtgccactgcactccagcctgggcgacagagcaagactccatctcaaaaaagaaaaggaaataagaagaatttacccttgccaaggggtgtgcctaggcgtgttcaggtttcaacaagggtaaatgtcagcaggggatgatcccttgcaactggcatttttagaggcactttggctgcagtggagatggggtgggacctgccaggaggctggtgtgatcagccagccctgtcccctccactcccagccctctcctcagggacatgagacattttccccaatgtcggctgtccatctccacccttgtcagctcccctcagctcggacttcctcctgccgtgaagtccctccagagtagaaatggccatctcccatttgctgggtgggcagcaacatgttcccttggcccaagtcccagaggagccaggggctgaggccaagatgggaaaactgggggcaatcccctttccttctggcttccccacggctggtgcagcttgggtgaggcggtgggggttggggggcttctggctgttccttagaggatggaggctcagctggggcgagtcagtgttctctctgagtatactggccaggcacgggggctcacgcctgtaatcccagcactttgggaggctgaggcgggaggactgcttgagcccaggagtttgagacctgggtaacatggtgaaacctcatttctacaaaaaaaaaaaaaaaaaaaattatatatatatatatatatatatatatatatatatatatatatatatatatatatatatacaaaagattaggcgagtatggtggtgcatgcccactgtcccagctcaggaggctgaggctgaggtgggaggatcactttagctcagggaagttgaggctgcagtgagctgtgatcacaccactgcactctagcctgggcaacagagtgagaccctgtctcaaaaaaacaaacaaacaaacaaaaaaaacccacccagaaccgaaaagaagtgtacctgtgtgggcactggggcctcctctttctctaagggaagagaatgtcctttaggtcttcagatctcgggtgcagaaatcagctctgccactgactcacttattttattattaaaaaaaaatttttttttaggagatggggtcttgctatgttgctcaggttgtccttgcactcccggcctcaggcaatcctcccacctcagcctccccacttactagcttagggatcccttcgcctttttaagcccccttaactgcctgtctaaacatcaaccacctgggccatgctgtgtgacctgaagtcttcagctcaccctctctgggctaggcatcagagcagtgtaggccaaatgcagaagcgtgacccaccaactctttttttttgagacagcgtcttgttctgtcgcccaggctgaagtgcagaggcatcatctcagctcactgcaacctctgcctcccgggttcaagcaattcttgtgtcccagcctcctaagcagctggaattacaggtgcacgccaccatgcccggctactttttgtattttttttttttttgagatggagttttgctcttgttgcccaggctggagtgcagtggtgcgatctcagctcaccgcaacctccttgaattcaagtgattcttctgcctcagcctcttaagtagctgggatcacagttgcccaccaccacgcccagcttttttgtatttttagtacagacagggtttcaccatgttggccaggctggtctcgaactcctggcctcaagtgatctgcctgcctcagcctcccaaagtgttgggatgacaggcgtgagccacaccgcaccgggccacagctaggaactcctgatgttctaggaggatgtctcacattggaaggaaccccgtcctcccccgggggcagccacaacacagaggcagggacacagcaccgaagcttctcacatctttattggaaaggcacagctaagcccacccttgatacagcattttccacttctctctgtagagatcagacgattgaacacgagataagctgactatatacagacacaggtgtgggtgttgcttttttttaaaaacacttttgtctttttttttttttaatatcccctttcttaaaagacaagctagtatactggaaaaagaaaaaaataataataaaataaaaaccaagacaactttagtaccctcatctttatttgggaaggggagggggaatcctgggtcgcccaccctcaccctgctcctcccagctcagctaagctcgtccctcgtgcccccccttttgtgggcgatgggagaggaccaggtgggcgtggaggtgtctggaactagcagaggtggtgagtggggcaggtggaggtgggagcatacctgggacccggggtcgggggagactcggggtgcccaggacgggaaaggggcagctagcattgcgtgcatgcagtaccagggtgagagggctgtggcccaggcagactgtcggttacacatgttcaaaacgggggaagggccggggctgctgcgcttcgcgaggtcttgctcccttgggacctggtctcccatctgaccctccaggccttagcttgcctcacatgtcagggcaggtatccacctaaccaggctgcaggggaggaggagggaagccgggaatggggtaggaagaaagctagaggtggcctgcaagctgggctggggcccccgccggcggccaccataaatactatgggagtttagccaatcccgagctccgctgtgtcttgtgctaaacattcctttctctccgtgcctctgtctcccctctgtcccccctcccaacctccctgtcccggccccctgctaatccgacttctcgccatcatcctcctggtgggtgtcaccatcgtgcccgttcttgtcttccttggagaggtgggcctgggaacccagcgcggacagcgagaggaggccggtgcctgcgctgaccgccggcagcgaaggcggctgcagccccacgggtagtggggtcaagggcagggccagggcctgcagctgggacagctggtgggcttggagctgctgctgcagggcgggggaggggaacattagctgcctggggcccacctgtcccccgcccacccgcccaggtccccatacatactcggatgatagagttcagctcgggagcggtgacctgcttggccctctcaatggctcccaagacctgctgctggtgctggaagggggtcgggggagaggagaggcagtgattcctcctgatcctgggagaggagagggggacggccctgaggccaggaggagccccactaccaagtgggccatcatgtctgctcctcccagtggttttcaaccccatcagaaagcaccctccctctctccaactgcttcctttcaccaagctcgtctcttcgtctggccaacagagacaaatggaaaagtgcagaaaacaattaaaagggttttgtgctaagtagttaggaaacagcttttgagtgagcccgggagaaaccctggatcctgacctatcctatgtgcacagccacctgcaaagatgtgaaacatgtgaatgtttgtgcagtacacaacctgcccaactgtacagggacgtcctgatcctaggagctccaagactgtgccctgagtctggccaaattgagcccttctcctaccatggctggggagggcccaatgaattctggcagggctggctggggaatgggctcagattcagggcagttcctccctgagctctccccaaacacctgactctgtggccagcagatgctagaatctaccaatctccctttttgccttggctaccaggaagcctctgttctgaagggctccaagtgcccttttctctagggctttcattgggtcctgctaagacttgtccctgggcaaagcagggcacccaaaggatcctgagatacccacagggattgaagaggaagttacaaacttttgacagtaaacttggcagggacaggagatgggccttacatggccctggggaggggcggcctcgcatcctgagcctcagaacccaagaaaggagaagaggagctgggcgtcaggttcatctgggtgtgtgtgtgcatgtggtaatgtgtgctcaggatcacgtgtgcccacgtgtagctgcacattcctgcatgcgtgtccctgtgctgtctgcacacacgtgtatccgtgtctgcatctgtgtatctcccgtgtgttgatgtgctcgtgcctatctgtgtggctgtgtccatgtgtgaccaccctgtgctaccccttcccccacaatcccctaacaccctctagtccttggtcctgtgcagcccgcatggcctggaggaggatgtctcaagagggtgaaaggaggaagagagatgagaaaaaaacattcctggtgcagtttaggcccatctgacatttctacctatgacatgactcactccagctgggaattccagagcagggtgaggcccgccccccacacgcctgcacccctggagtgtctctggcccggggattcttctgcacaggccggctctggtgttcagagccagggaggtccagagaggggaggcgtgtgccctggggcgcccagcacaccacccaagatggctgcagtggacaggggctgggcaagtgcggggccccctcacaacccctccccaaggccctggctcttacctcttgggagaggtagggcaggacctgggcacaaatcccgttcagccttttgacgatctcagcctggaacacacagatgaagccggcttcagtcctgggcgggtggcaggtgcaggctagccacaggaggcctgcgcggggcccggcccagccctgccacttgcggcttctaagaggggctaggtctggccagggtgggatgagcaaagccgtgttcgggcccgagggcagccagtcagtggcaaaggtggggctggacaccggctgtcgcctgcagcttagagtgaggtaagtgcaggatgaggccagactgcacattcctcgggggtcggccactcaggcccctggcaggtagtaagcgcttgtgcgaatgtagggagggctgggggccgtaggctgtggggaaggtctctgcccctccccaccaccgggagaaacactcccagggaggcctgaaaaagaggcggggcgggggggaggagagcgggagcttggggagggcttaggaggtaacaggataaccgggctggcttggtgcccagccgagggccggccgctacctgcctgggggtgcccaaggcggggctggaggtggggggaggagggggaaggaggaggaggaggaggaggaggaggagatgggcgtacctgtttgtgcatctcgatgttcaagccgtaggacatctcgtagtactgtatgggggagagagagggggagcgggagatgggggtggggaaggatggggggacacggagacaaagagataggggagtggcagagacagacaaaggggggagacagcaagagacagctgagggcaggaaagaaaggagaggcaggtgggagggaaagaggagggagagacgcccacacccagcatcccagcccgccctggagaggggcagggggccgctggggctgcggatggagactgggggcactttaggtccctagccctggcctggctcctcccccactccatgtgcaccgcgagaacacgcattccagggctcctaatcttgtatctttctatgtcttgtctgcgggtgggcccagacgccagggaagtttgcctgcctaggtataaacagtgaggggtaaacaaagcctgctggctctggggccagcagctacccccaccccaagccccagatctcaccctgcccctcccctgctctaaaccctcccatggctccctgtcacccctgggggaaaaccaagttcattcccaggccttcacgtagtttctctgtctctgtctggtgaactcctactcatcctgcaagaccccagctgtgtgccccatttctccatatagtcttcctcaggcaggtcctaggtccctctctctgaccccagccctattcttctggctgggagggtcagggtctggctctgcctcccccacagtctgggagatttgggtactgggctgagaccccagcatcgctgctcgagggccaggccaagggtgggtaagggaggggatttttgatgcagaaatcgtcacctggcagttacaaaaccgagcaagtggttctggcagcagcaatgcagtgtcacacatcagccccccgaaatgggtagggctcagaccccctcccacaggcttcttctttgagctcgggcccaaaggggttaagcgtgtggacgctgggaccttggcggtggggagggactcggctgctcccccacgtcagttcctggctgttggctttcacagccggtgagcctccctctcctccctcctccgctgccaaggacagccgggggacctggcagggccggtctgcaacccggcggtttggcacctcggccactgcctcggccatctgccaggctagcgaggcaggctcagcccagcaggggccggctgaatggagaacaggccccgatcctcgcgcttcccaggggaggtggccggggttgagggagcagctgcccgtggtggaggggatgtggagggccctgtcgcccgcccccaacactggacctgggggcggagtgacgttaccatcacatagtgacgctgcatctctgacttctcactggccaacttgtcacattcgagcttgaggctgaggaggcacaggggggagatggggtggttagtggcggctgggcgggagccccccaccctccgttatccaggggaggaaactgaggctccaagtcccctgtaagggcaagatcagccaattctcagagggtcaagcaataattttttttttaaattgagacgggggtctccctatgttgcccaggctggtctcaaaaactcctgggctcaagcaatcctccttcctcggcctcccaaagtgcttggggttacagatatgagccacccaccgtgcctggtcaatgaagccgtaaactttcataggggctgaggacattgaattgaggggcagggaagttggtaagagttgagctctctgtgatgctgcggggaggggagagcatcagggcccctgactgtaagaagggggtgatgaaaccacccttgcagatctggttggggggaaataagcaacattatagtaacattataggaacaacagaagttagagggggcacggtaacgctagctctgagagtctcacgagccttcacctctcacggtcccgacgaggcccgcaacgtcattgtcacgctccttttatagatgacacagtggacacccagagagggtgaggaactggctcaaggtcacacagccaagcagcagcccaagctctcaaccacaggggaaaattttccagacccaaatagaacgtacaaagaggctgagagggtctggggctgcaaggcggctcccggctggacttcccaaggggaccctagcttcatggggggcctggacttcccaggcagacccctcagctccctcttagtccttcctaacagccttttttctttagctgggacaaaacacaccatttctcccactccacctggccagtccgggtggctgacaccagagcttcctacaggccctcccgggaaggatgagctgtggggcgtttctcaaagcccccatgagggcgtcatggccggagggaagagagcaggcaggagggcctcccagtccaggaaaagaactggtgatggtggtgggggaggtgtcctttaacctacttaaatccaacccagcacaggggccctgcggacctggctgtggcttacctgcttctgccatccccaccccctctcggactgggttcaaagctcagcccttcgtcttccctgctgtgtgactctaggcaaactccactacctctctgggcttcatttcctcctctgtgaggtaccactaacaacctcgcagggtggggtggagaagagtcaatgaattcagacaagaaaagttctagaacagtacctggcatacagtaagcatcccataaatgcacatggatcttaggataccccaggaacctggcattttgctccaccggagaagagtgtgccgggttagggatgctttggccgccaccaatttttctctagttttcttttaaaatgtgcatttgttgctaccattaaaaacaaaaacaaaaacaaaaaaaaaccggggctgggtgcagtggctcacgcctgtaatcccagcattttgggaggccaaggcgggtggatcacttgaggtcaggagtttgagaccagcctggccaacataacgaaagcccgtctctaccgaaaatacaaaaattagccgggtgtggtggtgcacgcctgtaatcccagctacttgggaggctgaaacagaagaatcgcttgaatcccaaaggtggaggttgcagtgagccgagatcgcgccactgcactccagcctggcgacagagcaagactccgtctcaaaaaaataaaataaaataaaaaagaagtttcactccaaagcctgcatttctggcctttcttgaaaaataggatggtctggccacccaggggctgttacgcctcgaacatccggtgtgtgcctctgatatggtagggtccctcgttggacagcaggaagcccaggcccagcggatggagaccccaaagctcagagagggcttccggcttagcagaggtcacacagcactgtgaccgccatctgatcccttccctgtggaatcaggtcagccccggggctcaccaggcggtatccaacccttcatatcgaggaacccgcacaaaagcttctggggcctgcatggaaagctgactccagcaccttcgactgtcagtgtctcagtttgcccagcttgagaatgggtacgacagtcggacgacaggaaggatgaagcacgaggaggcacgaacggtcttgagcacacagggagtacccaaaaaggtgggatatttgcagcagcaacaacaaaatcgagattcccctttctacttggaggaaatccaggatccttccaggaacacttctggggtgggcacgcttcagtttagagagggccccaaggccaaacgggggtttgagcatagcctgactttctccagattcccaggcccggcgtgcccctccagagcagggcaggcgagaacctatatccttaaaccaggagagagacctggtgcaaacctcagccttgccacttcctcaatgctatggacacccccgaggaaataacatcataacatctctgggcttaagtttctttttttctttcttttttttttttttttttttttttgagacagagtctccctgttacccaggctggagagcagtggctccatctctgctcactgcaacctccgcctcacgggttcaagcaagtttcctgcctcagccacccgagtagctgggattacaggcgcccgccaccacacccagctaactatgtatttttggtagagacggggtttcaccatgttggccaggctggtctcgaactcctgacctcaagtgatccaccttcctcggcctcccaaagtgctgggattacaggcatgagccaccacgcctggcctgggcttaagtttctttaagtgtaagaggactaaatagttccttccccttagataccgcagcgtggcaagctcttcagaaacgccagatttctgaaagaagcagcaccttggagaatctgacgggtgctgggaaccctttctccaaaactgggcaaagagagagatgaccaggctgcagaatgtttctgttttgggggttgagggatggcgagtccgtgccgtaactccaattgttggaaggtcttttatccaatgggggacttgggggtattggggaggagggaggggctctgaagccacacagctgaatctttgggcaaattatttaactatttttgtgcctcggttttctcctctacaaaatggggctgtttaaaataaatgaattcagtatttgtcaagtgattaggtcagagtctagcatatattattttcccaatctccaggcctcagccttgccatctgcgcagaagaaatggggggactcacattctcgggacgcagggacccccagtcccccagctcacctgtggtactgagcttgcagtagctgaaattcgtctttgatgcggtcgcaggagtccgaggtggtgaatttgagttgctggggtaggtgcgaggagccctgtagggatggggcggcccgggtcaggcccaggcgtgggctggacccccctcaagggccggctaggagggagcggccgcgcagctgcggcgccccccctcctgccccacttcctgggcccgtgtttacggcccctggcgcgaccccacccgcgcttcctgccccccgcctctcccgggggaagccgagcgggtgggtgcgcccggagccgccccgtcccccgccacccccaggcagtgggggtgcgttttaaggcccgccctagatggggggcagggtgcgccctctaccgccctccaaagcgccgggagggagtgcacatccgaggggggtagaaacgcgccctagggagccccctccccaagttggggggcagcgattcctccctgcaaagtcctcttgggggaggggtctctctctcggtgctcgaaatcttccgggggggcccaaccccagattcccagcgcccttcctcggggacacgctcttccgggaggggtgcgcctcggatcaccccccccaccacaggcccccaaaggatccccgggctagaggtgcctcgcggggcttccggagcgccccaggcccgaggccaaggccgtccgaggccctgactgtcccggcgggttggggggggggggcgccaagccgggagctgcggcgggggggctcggggcccggaagctggggtggatcgggaactggagggggggtgtccgggggccggcggcaggaggggaggggggtcgcgccgggctgggagctggagagggaagacagggccggggagttggggggggcgccgggccggaggcaccgggcctgggggttggggggcgcggggccgggagccgggggtcgggggcgtagggcccggatccggggtgggggcgccggccggacgggccccgcttaccgaatgcctgctttgtggaaacatcatgtcaatcgcggcggggggcgcgggctgcgccccggctgtgcgccccggctcgggctgctgggggcgccgggcggccgcgcctttgtcccggcgccgatcggcagctcccggggccgccgccgcctcccgcgcccggcctcgcccgcttcctgcgccccctccccgcgcgcccggccccggcgcgccccgggccccgcttcctgcgcgcccggcgcccctccccgcccctccccgccgcccgcctccccgctccccggccccaccgctattgtctaatggcggcgacgccggcagtggccgcggctcggctgctgcggaggcttcggctccacctgccgccgcccgtgccccgtgcgcgccgccgaggggggggacgcgcgcgcccggggaggcctgcggatccccacgccggcccgcctccccgtggcccgcccgccgcggtgaccttgggcccggcccgcccccgccccgggcagcggcccccgccaccctctcctacccggcagccggccgggcctcggtttccccatctgtcaaagaaaagggacccggctgcccgcgtcgaagccgccggccctgctgtggcacgacctggacgcgtgccacggacgtgctctgtgaccttggctctggctgggcggtggttcttgctgagccttagtttccttttctgcagaaaggcagcggtaatgccgccttcctgagggaagccattcttgtgacacatttatagaacgcctactgtgtgccaggccccgctgctccagggccctggggtggggcggggcgggggtgggtccctgccctggtggtggtgcctggagacagacagagacaaattcacaagctgaattcctggcaggtcagatggtggggacagttctgcagaaaaaccagccgggagaatggcagggtaggaaggtgcaaagttaaagaggtgggagggaggatcagagacggcttcctccacccctaaagcgacctgaagaaggagggagaacagggggatggggtacagaggtagtcagaggcaggaccaacaggtgcaaaggccctggggcaggactgtgcctggcagcagagtgcccggggggaggtcaggaaggccggagggaggcagggccgggggcttcgtgcttttgtccagggcccccccaccccacagcagggcttgtgcttgggttaatatttactgctgcattttgagatttctaatcatttttgaacaaggggcctttgagttttcttttgcactgggccctgctaactctgtagctggtgaagcaggccagtccagcaaggacttgtgggtcttggggaggacttgggattttgctctgagtgaggtaggagccctggaaggctgtgggaggaggagggacgggacctggtggttggttggtttgttttttgagatggagtttcgctcttgttgcccaggctggagtacaatggcacaatctcagctcaccgcatcctgggttcaagtgattcctgcctcagcctcccgagtagctggattacaggcacgtgccaccacgccccgctaattttggagttttagtagagacggggtttctccatgttggtcaggctggtcttgaactcccgacctcagatgatctgcccgcctcggcctcccaaagtgctgggattacaggcgtgagccaccgtgatcagctgtttgtttgtttttgagatggagtctcactctgttgcccaggctggagtgcagtgatgtgatgttggctgactgcagcctctgccacccggattcaagtgattctcctgcctctgcctcctgagtagctgggattacaggtgcgcatcaccacgcctggctaatttttgtatatttagtagagacaggtttcaccatattggccagactggtcttgaaatcctgacatcaggtgatcctcccgcctccacctcccagagtgcagggattacaggtgtgagccactgcgcctggccctggacttgggcttttgctctgagtgaggtgggaatcctggagagccgtgggaagaggagggatgggacctggtggcggttattaaaggatccctctctctgccacgcagagaacaggtcccaaagaggctactgaaataaggctatgacattaaggtccccctttggcaggtgcgaaacacagtctcttcatcatcgtcatccactaggcagcctgctcccttgaatgaatgcaattgatttgggccttgggtgttcccatctgtaaaatagacttggaaccccaggctccttaccttggcaggtaagggtgatagccttcagtgatcaagattaataatctttaaagcagtgttttaatatttttattaaaaaaaaattttttttttgaggtggagtctcactgtgtggcccaggctggagtgcagtggtgccatctcggctcactgcaagctccacctcccgggtttatgccattctcctgcctcagcctcccgagtagctggggctacaggcgcccaccaccacgcccggctaattttttgtatttttagtagagacggagtttcactgtgttagccaggatggtctcgatctcctgacctcgtgatctgcctgcctcggcctcccaaagtcctgggattacaggcgcgagccaccacacccggcctaaaaaaattttttcagacacagtcctctgttgcataggctagagtgcagtggtgcaatcatagctcactgcagcctcccactcctgggctcaagtgatcctccgacctcagcatcctgagtagctgggactacaggagtgcaccaccatgcccagctaattttaacattttttgtaagccgggagcagtggctcatgcctgtagtcccagcactttgggaagccgaggccagtggatcacaagctcaggagttcgagaccagcctggccaacatggtgaaacctcgtcactactacaaatacaaaaattaccggggtgttttggcgggcgcctctaattccagctacttggaggctgaggcaggagaatcgctggaagctgggaggtggtggttgcagtgagccaagatcgcgccactgtactccagcctgggtgacagagtgagactctgtctcaaaaaaaaaaaaaaaaaaaagatgaggctagaaaggattaggattttggatttttaagattactactacttggtggccgggtgtggtggctcacacctgtaatctcagcgctttgggaggccgaggcaggcggatcacctgaggtgaggagcttgagaccagcctgaccaacatggagaaactccgtctctactaaaaatacaaaattagcctggcatggtggctcacgcctgtaatcctagccacttgggaggctgaggcaggagaattgcttgaacctgggaggtggaggttgcggtgagccaagattgtgccactgcactccagcctgggcgacaagagcgaaactctgtctcaaaaaaaaaagaaacaaagaaacagagattaatactacttagtaacagccaagccttcaaccaaccgcaacacccttgtttttcctgcagggccctgagagactgcgttcctagactgcccctgaagccagtcctgccgctagcacccctgccaccccacccccactgccgtggggaccagacaccccctctcctgggaggccacctgccagtgtttatttaggcaggcgccttccggtatcagtgtgcccgcccagtgaccaaacagccccattttcgaagcccccacactgtcaggggaagcagaactggacacagataccttgagcacggtgaggtgagggctgggccacccacagggacctaggcctgtgaaggagagagtcattgtgaaatcatcgtttttagaaaataggttttttttctgcatagaaggcagcccagaatggtggcccacactataaataatcaaccaagccacacaggtctgtatgtttttgctccgcaccaggggctgccttaagcactttaacctttaggtacagttgtcacacccattttagagatggggggaaaacaggccggcagggtggctcaggcctgtcatcccagcactttaggaggccgaggcaagcagatcacttgaggatcaggagtttgatactagcctggccaacatggcgaaaccccgtctctactaaaaatacaaaaattaaggcgtggtggtgggcgcctgtaatcccagctactctggaggctgaggcaggagaagcgcttgaacccggaaggcggaggtttcagtgagccgagatcgtgccactgcactccagcctgggcgacagaatgagactctgtctccaaaaataaaaaataaaaaaaaagaaaacgaaaaaaaatggggaaagtgagtcacagagaagtgaagtgacttggccaagtgggtagggggcagaaccacgatgttatcccaggcctttgatcttgaccttgggcctttgagcactctgcagtgtggcttctggccgggacacgatggcagcacgtgctgctgggctgaggagctgggattttacctggagggcactagggagccacaggaggttttagagcaagattcttcagttagcgccatcgcattccaccctgggcgacagagggagactccatctcaaaaaataaaagtagattgcatcaaaatagtgtttatcctgatgacttaggtatttggcatccccttagcttttttatttttttttgagacagggttcttactctgtcacccacgctggagcgcagtggtgtgacttcggctcactgaagcctcgacctcccaggctcaagcaatctgcccacctcagcttctcgagtatccgggatgaaaagcgtgtgccaccacgcccggctaatttttgtttttcatagagatggggtttcaccatgttacccagactggtcttgaacttctgggctccagcagtctgccctcctgggcctcccaaagtgctgggattacaggtgtgagccaccacgcctggcccctcttaagtttgacacctgaaaaaaggacctcactctcggccgggcgggctcacacctgtaatcccagcactttgggaggccgaggcgggcagatcatctgaggtcgggagttcgcgaccagcctgaccaacatggataaaccccgtctctactaaaactacaaaattagccgggcgtggtggtgggtgcctgtaataccagctgctcaggaggctgaggcaggagaatcgcttgaacccaggaggcagaggttgcggtgagccgagatcacaccattgcactccagcctgggcgacaagaatgaaactccatctcaaaaaaagaagaaaaaaaaaaaggacctcactctcaagtacactcatcctggtcctagccctgcctcagtcaaatagcaaagtctgctttttggacattctggcccagatcattcattctcttggggggcaaggggcgtcctgggcactgcagggtgctgagcggtgtccctggcctctactcactccatgccaggggcacccccgagatgttccgcccacaggtgtccccagacatcacccagtgtcccgtggggggcacaatgacacgagaatgagcacccctggcttagagcatggaagaaacagggcagctggtggtagaagattctccccggtagtgtgatgggaggattaggcgagagatgggcagcctgggctgggcccatggcaaagagcttttttggggagcataacaagaacagaatgcagatggcgggagggtgaggaagggcagacagcttgccgcaggagggaatgtgtaattaattggcgagaattggggtttaagcacatcacagtgtctgggtggctgccactgagcccccctaccccacacacataaccccccacccccgtccctgaccccacgtgtccggctcacggtccttcctctccctgggattctcagggccacatctggggccaaggcggggcggggatctgtctcatggatccaatcgtctgagaccaggctcaaggcctggttacaaatgagcgctgggccccgcggcctccagggcagagcctggcgctggcgcgtgatggatggggccgcatggccattaatcacaggccggggaggaaacaggtggccgccgtgcagaagcagggacctccctctgctgggcccgggtggaggtaggactcagctgtccagccctggggttgagctcccggactgctgctacctggccgggtgacgtggggccatgagagctcactgctcaagaccttagggtcaccccactgctactcccaaatgcagcttcagatacttagagagcagttactgtgtgtcaggcatgcttgtaagtggaggttctgagcagtgaccaaggagagaaatccccccactccaccttttggagctgataagcttaaaacttttatttatttatatttttggagacggagtttagctcttgttgcccaggctgcagtgcagtggcacgatctcggctcactgcaacctctgcctcccaggttcaagcgattctcctgcctcagcctcccgaatagctgggattacaggcgtgagccaccacgcctggctaattgtttgtatttttagtagagatggtgtttctccatgttggccaggctggtcttgaactcctgacctcaggtgatccacccgcctcggccccccaaagtgctgggattacaggcgtgagccactgcacctggccccattcttgattgaagtgtcactctctcaatgaagctgccttcagcttccctatttgactgaggcagggctaggaccagggtgaatgtacctgggagtgaggtcctttcttaaggcataaaacttaagagaggcagggtgaggtggctcacgcctgtaatctcagcactttgggaggccaaggagggcagattgcttgatcccagaagttcaagaccagcctgggtaacatggtgaaaccccaactctacaaaaaacaaacaaacaaaaattagccaggtgtggtggcgtgtgcctgttgtcccagccactcaggaggctgaggtgggaggattgctttagcccgggaggctgaggctgcagtgagccaaaatcacaccattgcactccagcgtgggtgacagagtgagaccctgtctcaaaaaaaagaaagaaggctgggcgcggtggctcacgcctgtaatcccagcactttgggaggccgagactggcggatcacaaggctaggagatggagaccatcctggcgtgcgcgcacacacacacacacacacacacacacacgccgggcgtggtggcgggtgcctgtagtcccagctactcgggaggctgaggcaggagaatggcgtgaccccgggaggtggagcttgcagtgagccgagatcgcaccactgcactccagcctgggcaacagagtgagactccgtctcaaaagaaaaaaaaaaaagaaagaaaaaaaaagttaaggggatgccaaatacctaagtcatcaggataaacactgttttgatgcaatctacgtgtttttttgtttgtttgttttgttttttgagacagagtctcgctctgtcgcccaggctggagtgcagtggcatgatctcggctcactgcaagctccgcctcccgggttcacgccactctgctgcctcagcctcccgagtagctgggactacaggcgcacgccgccacgcctggctaattttgtttgcatttttagtagagacggggtttcaccgtgttagccaggatgctctcaatctcctgacctcgtgatccacccccctcggcctcccaaagtgcagggattacaggcgtgagccaccacgaccggcccactttttttttttttttttttttttgacggagtctggctctgtcgcccaggctggagtgcaatggcgcaatctcggctcactgcaacctctgtgatccactcacctccccttcccaagtgctgggattaccggcatgaaccaccgcgcccagccaacaatattttaacaaatcaaaattaatgaaaaaaaatccacaatgaacaaaatatcaaaatgttaaataaaaatcttgcataactcactcagactgcctcctaggcccagctcatagaggcctcaacccatattccgcgtgcaggtcatgaggtcagcgttttccctgctccatgggacacagcactgtctgacgtgtaatgcggtttgtgtgtttactttcttgaatgtaggccccgggaggcagggggtttggtgagtcctggtcacttttgtatcctcaatacctagaacagggcctggctcagtataaatgcccaatagttactgaatgagtgaatgaataaatgaatgggttaagatgacacaccaggttgttgcagaattaaatgagataagaccctggaagtaattagcacacagcacccagttggctcctgacatccttaatctacaccttatggcctgagtacaatgttctgattggccagccctgggtcacatgacatccttgagacaaattttatggctcgagtagaatgctctgattggccagccttgggtcacatgacttttcttttttctttttctttttttttttttttttttgagacagagtcttgctctctcgcccaggcaggagtgcagtggccggatctctgctcactgcaaactccgcttcccggtttcacgccgttctcctgcctcagcctcctgagtagctgggactacaggcgcccgccaccacgcccggctaattttttgtatttttagtagggacggggtttcactgtgttagccaggatggtcttgatctcctgacctcgtgatccacccgcctcagcctcccaaagtgctgggattacaggtgtgggccagcaggcctggcctggacaattacttcctctgagaggccttctctaaccagtcatatggaaaaaacaaaaaatattgttattatatcactctattttattgttatctatttttatttatttatgtttatttaacattttgatatttatttatttttgagacggagtctcgctctgtcacccaggctggagtgcagtggcatgatctcggctcactgcaacctccgactcccgggttcaagtgattctcctgcctcagcctccttagtagctgagattacaggcatgtgccaccacgcccggctaattttgtagttttagtagagacggggtttctccatgttagtcaggctggtctcgaactcctgacctcaggtgatcccccccgcctcagcctcccaaagtgctgggattacaggcatgagacaccgcgcctggcccaatttttgtatttttagtagagatgggatttcaccttgttggccaggctggtctccaactcctgacctcaggtgatctgcctgcctcagcttcccaaagtgctggaattacaggtgtgagccactgcaccctggctgggctgatttttttttttttccaagagtcagggtctcactatgttgcccaggcttgtcttgaactcttggggtcaagcagtcctcccaccttggccttccagagtgctgggattacaggcatgaaccatcgtgcctggcctaattttattttatttttttagtcagtgtcttgggctgtcatgcaggctggagaacagtggtgccatcatagctgattgcagcctcgaattcctggcctcaagtgaccctcccacctcagcccctcaaagtgctgggactagatgcgtgagccaccaggcaggccagctgtcatctttattatctgtcaccctgaaagatccatgagagtaaggagcggactgccttctgcactgctgtgtcccagggcacagcttggggtctggcaaagaatttctactcagtgcaaacatcaggtcttagtgaaatgaaagaatgagttagtatttatttatctggagatggagtcttgctctgtcccccaggctggagtgcagtggcatgatctggatctcggctcactgcaacctctgcctctcctcccgagttcaagcaattctcctgcctcagcctcccaaatggctgggattaaagatgtgtgccaccatgcctggctaatttttgtgtttttttgtttgtttgtttttggagacggagtcttgctctgttgccagactggagtgcagtggcgcgatcttggctcactgcaacctccaccttctgggttcaagtgattcccctgcctcagcctccccagcagctgggattacaggagtgtgccgccatgcctggctaattttttgtatgttagtagatatggggtttcaccatgttggccaggagggtctcgatttcctgaccttgtgatccgcccgcctcagcctcccaaagtgctgggattacaggcgtgagccaccgtgccctgccttaattttttattcttagtagagacagggttttgccatgttgaccaggctgctctcaaactcttgacctcaggtgatccacctgccttggcctcccaaagtactgggattacaggcgtgagccactgtgcctggctgacagtaattatttattatccccatattccagatgaggaaactgtggctcacaaaggggcgatcatggattttgtctgccttcctctccacccccagagctctgtcacacaacatggctttattgaacacttgcacgcctggtcttcgtctagatattagggatacagtgacccacatagctccaaccttacagcctagcaggggagccagacattaataaaatcactatacaaacatatgtggttataatccctcagcaatcccattggctccagctttaccaatatacccagaatccaatcaattcccactaactatagggttaccatcctggctcatatccccatcaacttgttcagtgcagcagtctctcatctcacgtcgtattttttgagtggatgtgacaacggaataacaataacaaaaaaaaaaaaacggaatggcttaagtccatggaactgaacattcatgacattagggctgacttcaggcatggcttgatccaggggctccaacattatcgggatcctgtgtcactgtgcatagctgggacagctgtctcccatggcagcaaacaaacaccgttccccagcagctgtaagctttcatcctcccagctcagcaactccagccaattccttctgcttaattacagcatgtctcaggactcattctcattggccaggcttaggtgacatgacatccctgatataatccctatgttctggctggaatactctgattggccaatcttgggtcacatgacttttccatttcaatctttttttttttttttttttggaggggggagatggagtctcattatgttgctcaggctggagtgcagtggcatgatcctggcttactgcaacctccacctcccgggttcaagtgattctccttcctcagcatccaagtagctgggactacaggcgcatgccaccacacctgtctaatttttatatttttagtagagacagggtttcagcatgttggccaggatggtctcaatctcctgacctcgtgatccacccgcctcggccgcacaaagtgctgggattacaggcatgagccactgcgcctggcctaatttttgtatttttctagagatggtatttcaccatgtaggccaggctggtctcgaactcctgacctcgtgatctgcccgcctcagttccccgaagtgcagggattacaggcatgagacaccacgcctggcctgttgtggttttgagatgggggtctttttatgttgcccaggctggtcttgaactcctagactcaagccacccgcccccccttggctgcccaaagtgttgtgattacaggcatgagccactgcactgggccaaatgtgttttgtttttgtgcttttcaccgtccccagcgcccccagctgccggccttgggagcctggtgttggcaggactgtgagtcactgttggggtgtttaagggcctttaaaaggtgttcccagcatttcccgggggctgtgcactaattaggtgattagtaggctgactcctgcagatgtctccctggggataccgggggactgtggggagcagggaagtgtggctgcctacttggcctgccctccagaggccccattgcctccccatagacacccaaggggtaagtgccagcctcagctttacgacaggtgggctctgtgtctctggacaagtggctgtccctctctggtcccatctatctgctttcccatctatctagtgggctgtgggcatatactatggtcctgtaggagccagagccactattcttgctctgttactcagatacctctaacctctcctcccagcaaaataatcatcccctttatcataaatggctgaggtttaccaaattttctcagagccccagcactgatccaggccttcaaggtaggcgcagttattactactttttttttttttttttttttaaatttcagagacagggtctggctctgtcccccaggctggagtgcagtgcatgatcatagttcactgcgcctccacctcccaggctcaaatgatcctcccagctcagcttcctgagtagctgggactacaggtgcacaccaccacacctggctaattttaaatttttttgtagagaaggggtctccctatgttacccagactggttttgaaatactgggctcaatcgatccacctgcctcggcctcccaaattgttgggatcacatttgtgagccactgtacctggccaaattttgtggggttttttgttgtttgtttttttgagacagagtcttgctctgttgcccaggctggagtgcagtggcatgatcttggctcactgcaacgtccacctcccaggctcaagcaattctcctgcttcagcctcccgagtagctggcattccagctgcccatgaccacacccagctgatttttgtatttttagtagagatggggtttcaccagtttggccaggctggttttgaactcctgacctcaaatgatccgcccacctcagcctcccaaagacctggggttacaggcatgagccacaaaaattgagtccaatctctgctcacaccagagaccaggataaactcccaatgggccagacagcgtaaaccagggggccccagctcctgggactcacctcctctctccctccccactgagggtgtggatttcaatgtgtacagcctcctagacccagtagggcagatgatcatgggacacagagtctcttgggggggtccgtggaatcccataacccagggggtctcaaccagggtgattctgctcccagggggcactgggtgatgtctggggacatttgtggttgtcacaatggtgggtactcttggcatggagtgggtggaggccacggatgctgctcagcaccctgcagtgcccaagacggcttcatcccagagaactatctggctccaaatgtccacagcggccaggggagagacctcattccagagctcgatagccaccaaccatgcatggttacttaggtttacactgagatggatggaaacgggccaggctgtaattaaccccagcgctttgggaggtcgaggcgggaggattgattgaacccaggaggtcgaggctgctgtgagctatgatcgcggccctgcattccagcctaggtagcagtgacaagctgtagatagatagatagatagatagatagatagataaaaatgagatgaaagatgcatttcctcagttgccctggccacggttcaggggctcagcagcccaccagtgaccaccacgtgggacgccacggagctagaatgtaggcgatgtggcagaaagtcctagcgggccgcgcagcgcggagacctccccgggtgcaaacgctccccgccccccacccacgcggcgcccgtgccgccggccgctgttccacggatgcccacacgggggcagtgtgtcatcaggatctcgcgcaccttggctcaggtcgcctgcacctgccctctccccaggagggtgagccaggccgctgggggtttggagacagcagcccctcggcttacaaatcctttgcgagcacctgctgtgtgccaggctgtgtgctgggacagctcagtaaatcagagagtcttatccatgctttctcaccgtggactttacgggagggatggttctctggggtggggctgtcctgggcactgcagggtgctgagcagcgtccctggcctccactcactccatgccaggcgcacgccccagtcgtgacaaccacagatgtccccagacatcacccagtgccccctgggagcagaatcatcctccaggttagaatccctgggttaggggattccgcagacccccaagagactctggatcccatgatcctctgccctgctgaggtcccaggtggctacacacattgaaatccacaccctgagtggggagggagagaggaggtgaatcccaagggtccccatggtttgtaccatctgccccatcgggagcttattctgctttctggtgtgagcagggagcagactcaattttccccccaaataattaactaagagatccccattctagacactgtggacattcaaggctggattgtcctctaggatgaggccgccttgggcactgcagggtcctgagcggagtccctggcatccacccactccatgccagcagcacctcctccaagtcccgacaaccagaaatgtccccagacactgctgtcaatctcttgatcaaggggtgcaaaatcaccgccacctgagaattcctttcttttttttttaattttttttgagacagagtctcgctctgtcaaccaggctggagtgcagtggcacgatctcggttcactgcaagctctgcctcccaggttcatgccattctcctgcctcagcctcccgagtagctgggactacaggtgcccaccaccacatccagctaattttttgtatttttagtagagacggggtttcaccatgttagccaggatggtctcgatctcctgacctcgtggtccgcctgcctcagcctcccaaagtgctgggattacaggcgtgagccaccgcagccggccaaaaattcctttctagtgaatcaactcatcacacatataaatatttatttgtttattttatttttatttagtttttttgagatggagtcttgctgttgtcgcccaggctagaatgcaatggcacgatctcggctcactgcaacctccacctcccgggttcaagttattctcctgcctcagcctcccgggtagctgggattacaggcacctaccactgtaccctgctaatttttgtatttttagtagagacgaggttttgccacattggccaggctggtcttgaactcctgacctcatgatccacccacctcagcctcccaaagtgttgtgattacaggtgtaagccaccgtgcccagcccacacataaatatatttaaattatgaaataagcagttatggccaggcgcagtgtctcacgcctgtaatcccagcactttgggaggccgagatgggcggatcacgaggtcaggagataaagaccatcctggctaacacagtgaaaccccgtctctactaaaaatacaaaaaaattagccgggtgtggtggcgggcgcctgtagtcccagctactcgggaggctgaggcaggagaatggcgcgaacccaggaggtggagtttgcagtgagctgagatcgcgccactgcactccagcctgggtgactaagtgagactccatttcaaaagaaagaaagaaagaaagaaagagagagagagagagagagagagagagagaaagaaaggaaggaaggaaggaaggaaggaagaaagaaaggaaggaagaaagaaagaaagaaaggaagaaagaaagaaagaagcagttatatgaggtgagggagctgtaaacttttcttgaccatcacatctccacccaggtaaaagtgattctcctgcctcagcctcctgagtagctgggactccaagtgcccgccaccatgcctggctaatttttgtattttttagtagagatggggtttcgccatattggccagtctggtctcgaactcctggcctcaggtgatccgcccgcctcggcctcccaaacacacatatacacacatgtactcaggacagaggtttaagtacctgcataaccccaataaaaattgcacaagataactcttcgctctgcaaagcaccacgcactgtgatgtttcctattctacttcatttaaaaaatatatatgggtcatgatccactgaattgatttctccacccacagactgaaaaaaataataattaaaatagcgactgggaatcacgcactccagaaacatccccaggcccttccactgtagaaaaaaatgaatgagccaggcaccaaggctcacacctgtaatcccagcactttgggaggcctaggtgggcagatgacctgaggtcaggagttcaagaccagcctggccaacatggtgaaacaccatctctattaaaaatgcaaaaattagccgggtgtggtggtgggagcctgtaatcccagctactcaggaggctgaggcaggagaatcgcttgaacctggaaggcggaggttgcagtgagccgatatcgtgccattgcattccagcatgggtgacaagaacaaaactccatctcaaaaaaataaattaaaaaaaaaatagtggtagcccggcacggtggctcacacctgtaatctcagcactttgggaggctgaggtgggaggatagcttgagcccaggaggttgaagctgaagtgagccatgattgcaccactgcactccagcctgggtgacagagtgagactctgactcaaaagtaaataaataaatataaatgcctccttctcactttatttatctgtctattttccaaatagattcatggattctctctctctctcttttttttttttttagatggagtttcgctgtcgcccaggctggagtgcagtggcatgatctcagctcactgcaacctccgcctcctgggttcaagcaattcttgtgactcagcctccctagtacctggaattgcaggcatgcatcaccacacccagctagtttttgtatttttagtagagacgagagtttgccatgttggccaggctggtctcgaactcctgatctcaggttatctccttgcctctacctcccaaagtgctgggattactgcagcctcccgagtagctgggactacaggtgtatgccatcatgcctggcagattttattttatttttttgtggagacaggttctccctgacaagcccaggctggtcttgaacgcttggcctcaagtgatgtgcctgccttggcctcccaaggttttgagactacaggcatgagacaccttgccaggcccagaaggaggggtttagaaggagtaacagggatagacaaagttacattgtgtagggacagagctcacactgtgggtagacagttccaggcagaaggcacaggctgtgcaaaggccctggggtaggactgtgcctgactagttagaggaacactaaggagacctgtgtgactggaggaaagggagacagggaggaggggaggacggggaggggctggtgcaggcccttgtgggccatggggcggacttgggcttttcctgaaggaaggtgggagccatggagggctgtgagccgaggagggacaggccctgactcagatttgaattcagttatgaaggccgagtgtggtggctcatgcctgtaatcccagcactttggtaggctgagtggggaggatcacttgaggtcaggagttcgagaccagcctggccaacatggtgaaaccccggctctactaagatatacaaaaattagccagacgtggtggcacgcacctgcagtcccagctactcaggaggctgaggcacaagaatcgcttgaacccaggagaggaaggttgcagcgagccgagattgtgccactgtactccagacagggcaacagaataatgctccatcagaaaaataaatacataaataaaataacaataattcagtgtgactttaacatgaagaggcttctccactaaatccatgtctgcagaaaccgggcacgagctgtccctggctgtgcgtggggatgtctgtggatggtcagacctccctgggctcggaatgggcttgtttcaaatgcagcttcctggggctggctctccgcacagtctaattcagcaaaggcggggcagagtctgagctgtgaccccgtgtcccgggtgtttcccgaatcataagatcagatgagcctgtgggcagaagctttgtaggaggccgtgtgcgtggccagagcctgcagccctgggtgcaatctgttttgcccttacttgggaataagaaactcaacctgctcacaggaggaaatggtttctaatgtttgtttttttaaaagagaaagtcttggctcagttatttgcccgaagccagaattgggataatcaaggagcttaaccaaaaccttcattcattcgttcggatttagtgcatttctttatttatatatatagtttttagagacagggtcttgctctctcgcctgggctggagtgctgtggcacgatcatagctcactgcagcctcggcctcctgggctcaagtgatcctccctcctcagcctcctgagtagcggggattaaggtgtgcactatggcaccctgccagatttaatatatatacacacacatatatatatatatttgagatggagtcttgctctgtggcccaggctggagctcagtagtgtgatctcggatcactgcaacctctgcctcccgggttcaagtgattctcctgcctcctgcctcagctccccagtagctgggactacaggcttgcatcaccatgcctggctaatttttgtatttttagtagagacggagtgatcctgacctcaggtgatctgcctgcctcggcttcccaatttttttttttttttttttttttgagacagagtttccctcttgttgcccaggctggagtgcaatggcatgatattggttcactgcaacctccgcctcccgggttcaagtaattatcatgcctcagcctcccgagtagctgggattacaggtcccaccaccacgcctggctaacttttgtatttttagtagagacggggtttcaccctcttggccaggctggtctcaaactcctgacctcaggtgatccatctgcctctgcctcccaaagtgctgggattacaggtgggagcccggccacaggtaactcttatatccctgttttgccaaaaggaaatggaggctaagggaggaggagtccctggttcaaggtcacagctcaaggtcatggagttgggagggagagcaaggagggagtgtgggaatttgaacccagggattgtgattgcagggtctgtgttgttatctgccccaaaacttttccacatgtgcacagcctccacctggacccagccctatcctccctcagcttgacaagccaagtcctgtctgccctggtcccctcgatgcagggcaggtgagccccaaaattggggcttagcctgggagggttcttggcttcacccaggaaagatttcaagggcaagtggtattagaaagggagtttttttttgttttttttttttttgagatggagtctcattctgtcacccaggctggagtgcagtggcaagatcttggctcaccacagcctctgcctcttgggttcaagggattctcctgcctcagcttcctgagtagctgggattacaggcacgtgccaccatacttggctaatttttgtatttttagtagagtcggggttttaccatgttggccaggctattctcgaactcctgacctcaggtgatctgcctgccttggcctcccaaagtgctgggattacaggtgtgagccacggggccaagcctggttatttttttcagacaaggccttgctctgttgccaaggctagagtgcagtggtgcaatcatagcttactacaccctcagcctcccaggctcaagcaatcctctcacctcagcctcctgagtagctgggactacaggtgcatgccaccacacgtggctactttttaatgttgtatttttagtagagatagggtctcgatatattgctcaagctattcttggactcctgggctcaagcgattctccagcttcagcctcccaaagtgctgggattacaggtgtgcggcactgggcctggccaagcaactttccatgtgcccgttggcctacggaaatttttatcactacgcttatttcaccgatgaagagatggagattcagagagggcaagtctccccctgaaagtcacacagcttggggagggtgtgctggatgagaaccagagagccggactcccagcttccagcagcataaaccacggctgttgttagtatggagtgtaggcgtctgtactgacatgtcttcatttctgttggcaaaatacctaggaatgaaatggctggatcctgtttatttattcaaaataaatataaatagatactgtttatattatttatttatctatctatttatttatttaatattatctttttcagaaggagtctcactctgttgcccaggctggagtgcagtggcatgatcttggctcactgcaacctctgcctccctggttcaaatgattctcctgcctcagcctcctgagcagctgggactacaggcgtgtgccaccatgcctggctaatgtttgtatttttagtagagacggggtttcactgtgttagccaggatggtctcgatctcttgacctcgtgatttgcccacctcggcctcccaaagtgctgggattacaggcgtgagccaccgcgcccagccacttttgtatttttagtagagatggggtttcatcatgttggccaggctggtctcgaactcctgagcccaagtgatccacccacctcggcctcccaaagttctggatttacaagtatgaaccacggccagccctagatcctgtttaaatttttttttttttgagacggagttttgctcttgttgcccaggctggagtgcgatggtgcaatctcgactcaccgcaacctccgcctcccaggttcaagcgatcctcctacctcagccgcccgagtaactgggattacaaacatgcgctaccatgcccagctaatttttgtatttttttagtagagacggggtttctccatgtcagtcaggctggtctcgaactccctacctcaggtgatccacccacctcggcctcccaaagtgctcggattacaggcgtgagccacagcgctcaactgatcttgtttaaattttgaagaatccggccggatgcggtggctcacacctgtaatcccagcactttgggaggccgaggcgggcggatcatgaggtcaggagattgagaccgtcctggcttacacggtgaaagcccgtctctattaaaaaatgcaaaaaacattagccgggcgtggtggcgggcgcatgtagtcccagctactcaggagtctgaggcaggagaatggcgtgaacctgagaggcggagcttgcagtgagccgagatcacgcccctgcactccagcctgggcaacagagcaagactccgtctcaaaaaaatatttttttaaataaagaatctgctagacttttttccaaagtagccgcactatttcacattcccaccagtcatggaggagaatcccagttgcttcctttttttttttgtttggttttagatcaggggttctcgttttgtgtgccaggctggagtgcagtggtgcgatcatacctcactgcagcctcaaactcctgggctcgatcgatcttcccacctcagtctcccaagaaactgagaccacaggcatgcaccaccatgccttactcatttattattttttgtagagatggggtcttgctgtgttgcccaggctgctcttgaactcctgagcttaagtgaccctcatgccttggcctcccaagtagctgggaccagaggcatgtgccaccatgcccagcttgaccattttttaaattttttatttctgagacagagtcttgctctgtcccccaggctagagtgcaatggcgccatctctgctcgctgcaacctccgtctcctgggttcaaacaattcccctgcctcagcctcccgagtagctgagatgacaggcacccgccaccatgcctggctaatttttgtatttttagcagagacggggtttcacctcgttggccaggctggtctcaggtgatccacccgccttggcctcccaaggtgttgggattacaggcgtgagccaccaagcctggcctgatgattttcttttttctttttctttttttaatttttgagacagagtcttgctctgtcgcccaggctgaagtgcagtggcgtgatctcggctcactacaacctcggcctgccgggttcacaccattctcccgcctcagcctcctgagtagctgggattacaggtgcctgccaacatgcctggctaatttttgtatttttagtagagacggggtgtcattatgttggccaggctggtcttcaactcctgacctcaggtgatccacccgcctcggcctcccaatgtgctgggatgacaggcgtgagccaccacgccggctgattttctttatggcaggcaatgagtgctcattttccaccctgaggcctggaggggctggtgtttgggtgcggagggtcctgccccctgactccggagctgtagttctggcaataggtgcccttgcaccctgcctgtcctcagcctgggtccccatcacctttgtcctcgctcgcagctctgtgccaggaaatggccttgttctcaccccgggccctcataaaatccagttcctcaaggtccaggaggccaaggccacaaggaagggaggaggccgtggggagctgaggagggagggaggggccgccaacgccatgaaggcactgctgtgagtgtggactttgtcactctgagcctctgggtggggacgctggagtcagtattcagctccgggttggggcccagggtcaactccccatctctggatgggcctcagtttccccatcttccccacaggaggctttctgtgtcctggcccagttcccggcacacagtaggcactgagaacggaagaccccccatgatgttgttgtttcttttctttctttctttctttttttttttttgagacggagttttgctcttgttgcccaggctggagtgcaatggcgcaatctcagctcactgcaacttccacctccagggttcaagcgattctcctgcctcagcctcccaagtagctgggattacaggcgtacaccaccacgcccagctaattttgtgtttttagtagagacggggtttctccatgttgagtctcgtctcgaactcttgacctcaggtgatccgcctgcctcagcctcccaaagtgctgggattacaggcgtgagccaccacgcctggcctgtttcttttctttctttcttttccccctcccctcccctctcctcttctactttcctttccttttccttcttttctttatttttttgagaaggagtctcactctgttgcccaggctggagtgcagtggcgcaatctcggctcactgcaacctgtacctcccgagttcaagtgattctcctgcctcagcctcctgagtagctgggattacaggtgcccaccaccatgcccagctaatttttgtattttttggtagagacagagttttaccatgttggccaggctggcttcaaactcctgacctcaagtgatccgcccgccttggcctcccaaagttccaggatgacaggcgagagccaatgcgcctggccttttcttttctttttctttctgccagggtctcactctgtcacccaggccggagtgcagtggcacaatcacagctcactgcagcctcaaactcctggccccagcaatcctcccacctcagactcccaaaatgctgggattgcaggcgtgcatcaatacacccagctaatttttaaattttttttctttctttttttttttttttttgagatggagtctcgctctttcacccaggctggagtgcagtggcgcgatctcggctcactgcaggctccgccccctggggttcacgccattctcctgcctcagcctcccatgtagctgggactacaggcgcccgccacctcgcccggctaattttttgtatttttagtagagacgggattcaccgtgttagccaggatggtctcgatctcctgacctcatgatccgcccacctcggcctcccaaagtgctgggattacaggcttgagccaccgcgcccggcctaatttttaaatttttttgtagagatggggttttgtggtgatgtccaggctaggctccaactcctgccctctaactatcctcctacctcagccttttgaagtgctgggattacaggcgtgagtcgctgagcctggccccaactgttgttcctgctccccactggatctcctcccaacaatgcccaggacagccctgcagccaggagggggtttccacggagtttcttttattattattattatctgagactgagtctcgctctgtcgcccaggctggagtgcagtggcacaatctctgctcactgcaagctccgcctcctgggttcatgccattctcctgcctcagcctccaaagtagctgggaccacaggcacccgtcaccaggcctggctaatttttttgaatttttttagtggagacagggcttcactgtgttagccgggatggtctcgatctcctgaccttgtgatctgcctgactcagcctcccaaagtgttgggattacaggcgttagccactgcgcccggtccacggagtttctttaataaatgctcaaggctgggcgcgctggctcatgcctgtagtcccagcactttgggaggccgaggtggggaggtcacgaggtcaggagtttgagaccagcctggccaacatggtgaaatcccggctctactaaaaatacaaaaatgagccaggtatggtggcgcatgcctgtaatccccgctgcttgggaggttgtggcaggagaatcacttgagcccggaggtggaggttgcagcgagccgagactgcgccattgcacttcagcctgggcgagagagcaagactccgtctcaaaaaaaaaaaaaaaaaaaaaaaaaaattgctcaaggccgggtgtggtggctcacacctataatcccagcactttgagaggctgaggcgggcagttcacttgaggtcagcagttcgagaacagcctggccaacgtggtgaaacccatctctactaaaaatacgaaagttcgctgggcgtggtggcggatgtctgtaaccccagctacttgggaggctgagacataagaatcgcttgaacccgggaggcagaggttgcagtgagccgagagcatgccactacactccggcctgggccacagagtgagactccatttcaaaaaaataaaaaaaataaaaacgtaagtaaaaataaaaaagtaagtaaatatccagtctagtacctggcccatagcagacgcccaatcaataatcatcaataaatagatcccatttcaaattgtgacaaagtatctgaaagaaaagaacagcgtgttatggcagagactggttgaggagggaggattgcttgagcccaggagtttgagatcagcctgggcaagctagtgagatcccatctctacaaaaaattaaacaaatttagctgagcgtattggtgggcacctgtagtcccagctactcgggaggctaaggcgggaggatcatttgagcccaggaagtcgaggctgtagtgtgctgagatcgtgtcactgcactgcagcctgggcgacagatcaagatcctatcacaaaaaaaaaaaaaaaaaagccgggcatggtggctcaagcccgtaatcccagcactttggctggctgaggtgggcggatcacctgaggttgggaattcaagaccagcctgaccaacatggagaaaccctgtctctactaaaaacacaaaattagctggggtggtggtgcctgcctgtaatcccagctactggagaggctgaggcaggagaatcgcttgaacccgggaggcggaggttgctgtgagctgagatagtgccactgcactccagcctgggcaacaagagtgaaactccgtcttaaaaaaaaaaaaaaagaaaaggaaagaaagaaagaaaaagaaagaaagaaagaaatacaccctgtatcatggcaggagaggtaatcaatgaataaagaggtaaatacgataatttcaagctgcaaaaagggctatgaaggcaactcaacaggacgtgacaggagggagggcttggagtgggggtggcattagttatggattttcaggtaggacccattggagggggaggtgtttttagccgaggcctgagtgacaatattgggttttttttttcttagatggagtcgtgctctgtcacccaggctggagtgcagtggtgcgatctcagctcactgcaagctcggcctcccgggttggcaccattctcctgcctcagcctcccgagtagctgggactacaggcacctgccaccatgcctggctaattttttgtatttttagtagggatggggtttcacgatgttagccaggatggtctcgatctcctgacctcctgatccgcccacctcggcctcccaaagtgctgggattacaggcatgagccaccacgcccggccatatattgttgcttttaacagagacaggatctcactgtattgtccaggctggtctctaactcctgggctcaagcggtcctcctgccttggccccccaaagtgttggcattacaagcatgagccactctgcctggccaagtgagtgacaatgtttttggccacaatttgccctctggttgtaagtttcacatgcaattggagctttgatctattgaggcgggaactccaggagccccctggctacgtgcagctgaggtgggactggaaccccagaagatgagcttttcaaggagctaatcttttgtccgggtgtggtggctcacacctgtaatcccagcactttgggaggccgaggtgggtggatcacctgaggtcaggagttcaagaccagcctggccaacatggtgaaaccctgcctctacaaaaatacaaaaattagccgggcatgatgtgggggtgcctgtagtcccagttactggggaggctgagatgggagaattgcttgagcctgggaggtggaggttgcagtgagccgagatcatgccattgattgcactccagcctgggcgacagagcaagactgtctcaaaaaaaaaaagtgagctaatcttcccacacacccaaggaactgataaacggagactttgaccctccctttgccctcttatctcaagacaagggagaagggtctatcaaggtgtacctctgaggataagggataggctcctgacatttggaaactgggaagggccaggtagagggaggaggtggtggggaggtcaggcagtgtcaggggctgggagaggcgtggcagtcagcgaagttgtatgcaatggtgcctcagtttcctcctctttaaaatgaatttccagctccaagaacaatctaggctctagtattcatttttagtatcttccctttgtctttttttttttttttttttttttttttttgtagagacagggtctcactatgttgagaccctggtcttgaactcctgggctcaagtgatcctcctgccttggcctcccaaagtcctgggattataggcgtgagcaactgcacctgccttaatttcagtttttgagacagggtcttattctgttacccaggctggagtgcagtggtgcaatcatggctcactgcagcattgacttcttgggctcaagtgatcctcccaccttggcctcctgaatagctgggactacaggcacacgctaccatgcccggctaattttatttcattattttattttattttttgaggtggagtctcactgtgtcgcccaggctggagtgcagtggtgcgatctcagctcactgcaacttccacctcctggtgtgatctcggctcactgcaacctccacctcctgggttcaagcgattctcctgcctccgcctccggagtagctgagaatataggtgcaagccaccatgcccggctaatttttgtatttttagtagagacggggtttcaccatgttggccaggctggtcttgaactcctgacctcaggtcatctgcctgccttggcctcccaaagtgctgggatgacaggcgtgagccaccgtgcccagcaaattttatttttacttttgtagggtgtgtacgtgggggtcttgctatgctgcccaggctggtctcaaactcctggcctcaagcagtcctcctgccttggcctcccaaagtattgggattacaggcatgagccactcttcccagaccaggctttttaattcctttcccatcattccaaacacatcgattgagcacctagtgtgtgttagagcctcattctaggtctctttctgtaagggaccacataggaaatctttgaagagttcttgtaatgctgccctgtggggtaagagtagccacactcagtatggaaatcaatggatgtgactggcttccaacaaaatcctatacatggacactgaaatttgagttccatataatttttatgtctacctaaatattactttcttttgattttttaaaaccgtttaaaaatgtaaaagccaggctgggcgcggtggctcacgcctgtaatcccaacactttaggaggccgaggcaggcagatcacgaggtcaggggattgaggccatcctggctaacacggtgaaaccccatctctactaaaaaatacaacaaaaaaattagccaggcgtggtggcgggtgccgtagtcccagctactcgggaggctgaggcagtagaatggcgtgaacctgggaggcggagcttgtagtgagctgacatcatgccactacactccagcctgggcgacagagcaagactccgtctcaaaaaaaaaaaaagtaaaagccattcgaagcttatggaccatagggccgagggttgtggattgccaatctttgttctaggtgaaccagacaggctctgacctcatggagctgatggccaatttgggaaactgagtctacagagaggcacccagaagaatatataatttctttcttttttttttttggagatggagtttcacgcttgtcgcccaggctggagtgcagtggtgtggtctcggctcactgcaacgtccacctcctgggttcaagagattctgctgcctcagcctcccgagtagctgggattacaggtgtccactaatttttttgtatttttaatagagacagggttttgccatgttagccaggctggtctcaaactgctgacctcaagtgatctgcctgccttggccttccaaagtgctgggattacaggcatgagccaccacaccctgcttttttgtttttttttttttttggacggagtttctctcttgttgcccaggctggagtgcaatggtgcgatctcagctcactgcaacctccgcctcccgggttcaagaggttctcctgcctcagtctcccaagtagctgggattacaggcatgagccaccgtgcctggctaattctgtattttcagtagagacggggtttctccatggtggtcaggctggtcttgaactcccgatctcaggtgatctgcccacctcggcctcccaaagtgctgggattacaggcataaaccaccacacccggcctttttttttttttttttttgagacggagtctcgttctgttgccctggctggaatgcagtggtatgatcccagctccctgcaacctctgcctcccgggttcaagcgattctcctgcctcagcaaaagtagctgagaccacaggtgcccgccaccacgcccgggtcatttttgtatttttagtagagagggggtttcaccatgttggccactctggtgttttgttttgttttgttttgatacagggtctcactcttgtgtcccaggctggagtgcagtagccccatctccgctcactgcaacatctgcctcctgggctcaagtgatcctctcagcctcccgagtagctgggattacaggcatgtgccaccacacccatctaattttttgtatttttagtagagatggggtttcgccatgttatctaggctggtctcgaactcctgagctcaagcggtccacctgccttggcctcccaagtactgggattaccggcaggagctgccgcacctggccagaacatacaatttcaagttgtggctcaagagaaggtacctggcttggtctgaggagtcaggagaagtctccctgaggagctgacgtctgaattgaaacggagaggatgctcaggggttggccaaggaggccagagagggaaaagggttttcagtagtcagcaaggtggtgggaacacacgtttttataaattctggtggccacttccatttcatctgcaaagtaaggataaagatatggctgggtgaggtggctcacatctataatcccagcgctttgggaggccgaggagggcagatcactagaggccaggagtttgagaccagcctggccaacgtggcgaaacccgctctctactaaaaatacaaaattagccaggcatggtggcgcgcctgtaatcccagctacttgggagggtgaggcaggagaatcactagagcctgtgaggcagagggtgcaatgaacctagatcacgcccctgcactccagcctgggcgacagagcaagactccatctcaaaaaaagaagaagaaaaaaaagatatcccttgggtagggttagcttaacgggcttacagcagtgcctggtatcctgtaggcatttcatgaatgcgtatacctggcctggaatggtgcaggcactgcagtaaggcctgattgacacctgatggacagcaggcactccattaatctctggtccgtgcctggcatatagaatgtgtcccattaatgcctgatacacagtaggtgtcccattaacgctttttaatttttttttttgagacagagtctcgctctgtcgcccaggctggagtgcagtggcatgatctcagctcactgcaagttccgtctcccgggttcacgccattctcctgcctcagcctcccgagtagctgggactacaggcgcccgccaccacgcccggctaattttttgtatttttagtagagacggggtttcaccgtgtcagccaggatagtctcgatctcctgacctcgtgatccacccgcctcggcctcccaaagtgctgggattacaggcgtgagccaccgcgcccggccctctttttttttttttttctttggagacggagtttcgttcttgttgcccaggctggagtgcaatggcgtgatctcggctcactgcaacctccgcctcctgggttcaagtgattctcctgcctcagcctcccgagtagctgggattacgggcgtgcaccaccacgccgggctaattttgtagttttagtagagacggcgtttctccctgttggtcaggctggtctcgaactccagacctcaggtgatccgcccgcctcggccttccaaagtgctgggattacaggcgtgagccaccgcgcccgacctccattaacgctttttaatggatgagtgaaggttcctgtcaggcaatgtcagggcgcttcccgggggcagcgactgctgcccaggcacctggagacccagagagcgcagcggccgcgtgcgcgcctccgccaccgcgcctgggccgagccgagcgggaccgagcggggccgaacggagccgagcggagccgagcctggccgggccgagtccgccacattcccacaatcccgggcggccccgccccggctcccggctgcgcgtcccccttcccacgtcggcgcaaccaaacccgcgggccccccgccctcgccccgccccgcccctttcgcgcccgccgacgccccgcccaggccgctagtcccgcccccatggtgggcgcgcttggccgccggcccctcccattggccgcaccgtctgcccgtcgcgggctgcgctcccagcctgctaggttgtccggcgctgtcgctcggttgcggcggctgcggttggcggtggctgcggcggcggcgcgggctgagtgcggccgcgcgggagtccgcggctggcgcggcccgagcggggacccggcggctcgccaggcggcggccgaggcggggcgggccggcccggggccgagggccggtggccgaggccggagggccgcggcgggcggcggccgaggcggctccggccagggccgggccgggggccggggggcggcggcgggcaggcggccgcgtcggccggggccgggacgatgactctggagtccatgatggcgtgttgcctgagcgatgaggtgaaggagtccaagcggatcaacgccgagatcgagaagcagctgcggcgggacaagcgcgacgcccggcgcgagctcaagctgctgctgctcggtgagtgcggcccccgggcctgccggctgcgggccctgccctgcctgtgcctgccctgcctgtccgggtcgggccgggaccctccggggtcagccctgcctgtgccgtccgggtcgcgagaccctccggggtcagccctgcctgtgccttccctgcctgtccgggtcgcgggaccctcgagtgtcagccctgcctgtgccttcactgcctgtccgggtcggggcggggccctccgggatcagccctgcctgtgtcgtctgggtcggctcgggaccctctggggtcagccctgcctttgctgtctaggtcggcacctgggaccctccggggtcagctgcgggcccctgatttctttggggtcagcccctgccttaactgttcatgttggcacctgggactctccggtgtcagcctgtgtctgtcctgtctggatcaggcccccgatcactcctaggtcagctcccagcttctgctgtctacattgggcctccaggactcttcaggatttgccctctgttccttctcaagggaccagtccctccctgcacagggaccttctgaccttaccccaccggagtacccacccctcgctaccccttcagggccagacctttgggctgtaacccacagggcacactcacccctcactgctcagggccccgcgttgacccttccctccaggcagagccctgtacactccatgcaggccctgtaccctccatgcaggccctgtacacccccccatccccccgaagactcctccgtgtcccctatccccacattcccttcagggccattctcctgccttcctgttccgggaaaccccgtactcctcttggctggaatgcaccctgtgggaaaaagacagtctttcctctcctcagggttccgctcagctgagggtggggcggttgacacctgagggagcctttgcttgttgtcccaagcagctatctcggcagcctcccccgcccccttccttagagtcctggtgggagccacgctgagtcctcgttgagagcagccccccacctgccggctcctccccaccgtcctggagaaggtttgctggtgaacctccttctccccaaggcacacctgctgcagggagccagtcgggccagctgtaaagtgttgtcactccaaataagggccccttcagtggtttacaaaacagaagctcttgccctgccccgcccctgccctcccgagctcctaggttagctcctgggccgggggcggggcggtggggaaggtcggaaatgcgtgagaggcagcggtgacggaggagggggcgtgctggtggcggtggctcttggggaggaggcaggtcgcatgttgtgtggggaacacgttgcctctcctgccgtgagcctcttagggccctccgtgtcccgggttacagaggtgccttggatgaaacgccttcctgatttttttccccaaacttgtgttttgatttacctaagggttctaaaatgggccatctttccagggggccgcgggtaggcagagccgtggtcctcacgtttggaggaaatgtgcagtgcggcccgcgtggtggcactttgcacagagtggcactggctggcttttgtagtgggtcgtggactttgtttggatggaggggagttaggaattactggtgtcataaagatcttaccagatggccttgccctgtggctctgtgacctccagaacccccgccgccatccctgcatgcacccggtcttctgtgcctgcactttggacttgagattgacacggggttcaaggacgaaggtcaggggctcccgtgtctgccgccttggctgcttggagcaagtctggaagtgatgcggcccttcccgcatcctctgtccagtgcccgcctgtggcccgggggtgtctgctgcaggagcacctgtgtctgcagtcccaccccctcccactctgtgagcctgaaagttgacccctatcagcctgtaagacgggaggttgctgtcaggctcagggccaggcgtggcagataggacagtgaggaagatgtgagctcacgtgcgacccaaggaggactggtgtcagtgccacgcagagagccggggctgtcagggggttgggagggcttcacacccaaggtgttggagccagggacccctttgggaatctgatgcgacagaccctcagaaaacttcccgtccaagcaaccttgcatcccagctggagggccccttgctgggaggactttgaccacctgaggtccaggggctggggcctcagggtgcaggggaggggacctctgtcaggctccctgcctgcttgtgggaactcattccactctcccagtaggccagccccgagcttgcgattgcccccgtttttcagggagcagctagagggtggggccgaggctccccggaaggaaggggctgttgggctgcagcaggtggctatggcgcctgcggcccacggaatgttcagagacctctgggtggaggtcctggcactccgcaggaggcccagccaagctgggtctgcctctccctagaattctttcctcccctgccccttagcagtgggggctccatccctcctcccccatggctcccgtacagcgttgtggagtggatgtcggggagggaggcaggggcctgccaccacacccctgtggcatctggggcccaggagggtctcgtttatgtgggtggtgctggtttcttccaggctctggggcagcagggctccagggccctgccctgactcctgggtttgcaaccaggtggagcatgttctggaagaacgccgcgtctgctcgctctcatccactgcctccctggggctgcacacggcctgtgaggtcggtcagcctggcgaggacattccgtgccccgttttcggggtgggggggaccttacggagccctagagctggacggggctccggctgccgtgccgcctctcccgcggcggctaaaatgtgctgttcacgcctcagatgggcctctccgttacgtacaacaggtctccccggggccctgtgcacattggtccgggttggtctctggggtggggctgccctgggcactgcagggtgctgagcagtgtccgaggcctccacccactccatgccaggagctcccccaagtcgtgataaccacagatgtctctagacagtgcccattgtcccttggggggcacgttgcccccatttgagaccctttactgtgtggtagcgtacaacgtaaaatgctcgtggcaaagctgagggataatgagtgcaaattattttgtcagaagtttccatgagtgcttatagagtatttttctaagcaccgtcaaagccgtgtgtgtgtgaattcactactcagtgtatgcatgaatgtgaatgcatgtattgttttatacccgtggtattccaggtttgtccctatgcacacttctgtcgatgctggtgacagctgtggatgggtacaggagtggcaagcacgtactgcgcacttagtgcacacgctgctcccgcctccgtccgcgccgccgccatcctggggtccgccctgtggcctggagagctcttgcaggccctgccagcagctcttggatctgggttcccattccccaggcccgctgggcttctgcctatcacgggcagccctcggctgttaggtttccgtctcactggtaaactgtggaggggacccccgtatagttctttgtggcaggtttgtggttggaaacgtggggacttccatgggaatgcctgttcccagggcctgaggctgctagcgaggctgagccggagtggctccaggctttctaaataaagcaggatggttagttccggaggcttcctgtccggcctgcgccagcccccacggggcagtgacaaggcccgggatccagcatggggtgcggtggccccacgggaagggccgggcctctgttggcccagtgttgggaggcgtggagcgtggcctctggcgcctggcagggtggctgtgccgtgtcccagaagactctgggagcaggaagcgcccttggatggcctcgtccaaccttgacttcccaagcccgagcccaggccagggagacgtggggacttggtccgggcctgctctcacgtcctttgtgtttacatgtaatcagttatgatgattgtggctgaaagggtctgcttttcccgggcatggtccgggaagctccgttccacagctgtgagctccgtggagcttcctcccgagcctcctgcccggctctgccggtgctgtagtgagagtggaggaagtgctttcctccgagatttaaccacgagaggtttcactttctgagtcttgtggtggagcctgtctctgtctgggacctggaccctgggcagcacggggaggacgccgtggcatcaggaggttggagaggtgtgtggtggagtcggacggatcttagaggggcgctcgcggggcctgctcggccctaccctgtagacagctgggacccagcgccccttctgggtccccagcagggctgtgttctccccactgggcaccccagcttgtgcgtggaggatgggaagccttgtatggcttgcccacctgggtgactgagagcggtggatgcgattaggggcggccaggggctctgggaaggcccacgtgcagggtcattatctggcagaaattaagtcctttcgcagaaccgggatcctaagtgccggtttgctggcgtgcaggtggttgcaggtgcatgtagctcctgccgccaggccctgtgtggagcatcccgcccggggggcctcccaccatgtctgtcatctgtagggcacctggcaggtcttagaattggctgccctggatccagactctcgctgtcatctgggcctggccacatccctcccctgccatcaagatgtctgtggtccagtctcccaccctccatccccactccctgcctctgggtcagaagcctccgatggtctctgctgtgggggttcctggtccagcctggcctcccgcagtctgccgacaggcgctttcaggacagcactggtgggtgggtcttcgggccacctgcagggcctgggagcagtgtggtgtccggatcaggtacgtggcctggggagactcaggttcagagcctacctctgcctcttgtaactgtgggacttcaggtctgtgcctcagtttcctcagggggcggtggggtgaggactcggtggtgatccccatcctgccgcacgtggggacccacggaatgctggctgctgcttccgctgccggtgtggtgatatcttgtcgcgtccacagcacctggcgtgtgtggcacacattgggtgctctgagaaactgctccatgggggatcctgccctgggatctgggatctgggatctgcccacagacaccttgatcaggattccccagcctcggctccgtgggtgttttacactggatcgttctctggggtggagctgtcttgggcactgcagggtactgagcagcgtccctggcctccacccacaccagaccaggagcacccccaagttgtgacaaccacagaagtccccagacatcgcctagtgtccctgggagcaggacccctgacccgtgtgtcttagcagcccccttcccttctcgtcgccatcgtcagctgcgtgtccttggtcccctgcttccctgcccatgtcattgagctgtgcaggtctcagagatgcttggcgagtgaccgtcattggctgactgaaggcagatcacgcagggaagtggagaggagtggcccgacacctccccaatgccctgcaggctggtctggtgcacgccaggggtctctgctggggcaggctcggttgccacctgcctgtgggcctgtgcactgggcagaaggggtctccggggacagtgcgcagctggctctcagaagcttctttctgagtcctgcctgtggcctgggctgccctgggctggccagcacggggcagtgggggcacactctggagggagccaggggcgagtcacttccctctcccggcctcagtttccccatcggtcacgtgggaaggctgtccctccccctgtaggattgtggaaggattaaatgagctgaggccagtgcggcagacagcggggagggagccctcttgtcccctgtggctgcccttcctgctggctgctttgcaccgaaaagctgcggagtaaccctgggcggtggtgctccctggatggcgtccacatggggaccccaaggcctgggaggctccaggagggacggtgctggcccaggtttctgtccctgtctgacctcggagttggtgttctgggtaccgcaccgtccggtggcccaggctccgttttctcttctgtcaaactgtgtggtcaccctgatgtttcaggggccctgcagggacggagtggggtggggggctgaagggtgtggtcaaactggagggcgctgtgtctgttgctattgttaaccgtgtccacactgatgggtgctgggccccgccaccgagcgggacttgtgcggcctgcagagatgtggctgttctgttgcctgtcttaatccccagggactgtggggccaggtccacactgtgggatgagtgcagcccccacggctgtggtggggctgggtccacgctgtgggatgaatgcagcccccagggactgtggggccgggtccacgctgtgggatgaatgaagcagccttttctccagccacactggtttgctcggccttagtcccactggatgcggcgagggttgaccggtcaggcccttgctggtggcctgggtagatgtctggagagggggcctgggctccggactcctgcccttcccccatcagtgatcctatcccacactctttggcgatggtcagtgagctgggcaggggcgggggtctgtccctgtccctcaggtggagatgtccaggccagtgcccacaactgggttagatgggctgcacaaggctggggaccagtctcccaggctgtcggggggcttcagtaatggctgtgggaagacccagcacgtgaggagacgggagcttagaaattttgtatggccaggtgcggtggctcatgcctgtaatccaagtactttgagaggccgagtcaggcagatcactcaagtccaggagttcgagaccagcctgggcaacatgacgagacccctgtctctactaaaaatgcaaaaaattagccagacttggtgatgtgcacctgtagtcccagctacctgggtggctaaggtgggaggatcacttgagtccaggaggcagaggttgcagtgagccgagattgcaccactgcactccagcctgggcgaccgagggagaggttctgtctcaaaaacaaacaaacaaacaaaacaaaacaaacaaaaaaaaaacgtagaaaacatgagtgagtgacaccatccgcttccagtggaggggtggggtcactcccacttgggagccagtctgcacggaagcctcagtgggaacagaacaaggtggcatggcccctgaccggcgaggggcagttagtatctgcacctttgaggcacctggggactctgctgctgtggagatgggattgggttccagtccagaggctgtcctgccatcgctgcccctggctgtcatgccccacctggggtagtgagtttcggggcagctctttcttgagcctcagcagcggggtgagccgggtgcacttcctctctcagggcgcccccttgtcttcttgcctccctgcctgagggtgcgtgctggagcagaagagcacgtcctgggctgcctgccggggataagctgcggagccaggagaccgaagtctcttcaggccctgccattaggggtcgtgtgacttcagggaggcagcttgtcctctccgtgcctcagtttcccctccagtcaatcaggcgctgaggtgctgtctacctcctggggttctgagactgaagcgaagcaggcatgaggccccttgtgaagctggatgaggggcgtccgtcctccgctgcaggagggctgcccctcctcgggcccctgcgtcaggttggtgcctggctctgaccccacacccaccagtacagctcttggtcagggttagatttcctggctgtttccaagagccaagatcacaggcacacgcatgcacacgcgtgggctgccaccacccgccttctcatgggtgctgacaaacggtcatgtgtatcccccaggtggggccctgtggctctggccttgctcccggtgtgtgcactggcctggcctccccgcagcctggtgggggcttcctggcttctcggcccacatctcacagtcttgggcactgtggggctcggctcaggcgtcgtagacgggaagcagcctggaaccctggaagtctgactcccaggtgtcggctcccaggtctcagccctgccactggggtcatgggttacttgaatctttatatactttttatttgttatttatttatttatttatttatttttgagagagagtctcactctgttgcccaggctggagtgcagtggtgcagtcttggctcactgcaacctctgcctcctggttcaagtgattctcctgcctcagcctcccgagaagctgggattacaggcgcatgccaccacacccggctaatttttgtatttttagtggagatgtggtttcactatgttggccaggctggtctccaacttctgacctcaggtgatccgcttgccttggcctcccaaagtgctgggattacaggcgtgagccactgcgcccggccttgaatctttttttttttttttttttttttttttttttgagacaaggtctcacttgtcacccaggctggagtgcagtggtagaatgtttgctcacctctgtctcttgggttcaagcgtttctcctgcctcagcctcctgagtagctgggattacaagcgcccactgccacacccagctaatttttttttttgtaaattttttttttttgagacaagagtcttgctctgtcgcctaggctggagtgcagtggcacgatctcagctcaccacaagctccgcctcctgattcacgccattctcctgcctcagctttcaggcgcctgccaccatgcccggctaattttttgtagttttagtggagacgcggtttcaccgtgttagccaggatggtctcgatctcctgacctcgtgatccgcccaccttggcctcccaaagtgccgggattacaggtgtgagccaccatgcctggccatttttgtaaattttttggtagagacggggtttcaccatgttggctaggctggtcttgaactcctgacctcaaatgatccacctgcctcggcctcaaagtgctgggattacaggcgtgagccaccgcgcccggctttgaatcttgagcatcggatgagcccccagctcctgctgtcagggctgcgccctcttgtggcgcttggagcctccttttcttccgttttcctttcccaccggggaaaaggaagctggggcacggacttcgttcctcctggttggcctctccagatcttggccagcgggtccagtcgggagggtggttttctcctctggaagctggctcagtgggagcagtgggcggactctggcccctcctagtggtggcgtgctgagtgtacctgaggatgtacctcctgcaggctccctagcgtctggggtccactgtggggcggcctgtggcaggcccaccaggaaccatgcttgcacaggcaaagcaccttgcttgtggttgtgtggggggctccctcaggtgtgggagatgtgggccccattctcccaggagccatggctggtgacatgcagtcaggtccatcctgacgggcactggagtgcgggggacccaatggggacatgagggatccagcactgtggaccagggccaggttcatttggttcgctcaggaaacatgtacacagcgccttctgcataggggctagggatgcaggtgggcagggcagccacagcccctgcgctcaggaagctggcgaggcaggctgcagacgggcactgccacacctcactgaggagggaatggcagagccaccctcaaagggcctgtgctgtgggggtgctgggcgcttcctgaacgccgggctcttggatttctgcagtgggggttctccgggcgtttgggaaggggaaggacctgatggaaggggtagtttatatttaactctggtgctgaagcaagggtcgcacacagctgccagtgcccacgacggcctcctgggaggctgagctcaccagctccagacccagtctgaggcaggaacctgggggtctcacagcgggaccggtggtgggtgtggcctcgtggcagggagggagggtgggaggggtgcatgtgaagttgggtttgactcgtcacccgtggagtgcgtgctcccctgccacaggcaggggccaggcagcatctgtcctgcaggaccctcccagctgccctttcatggccggacccctggctggatccctggcttcctgcagtgttctcttttcctaacattttgtcaccgtctcagtcagctcgggctgctgtgacaatactgcaggcacagtggcttgtaaactacccgagtttgtctcatggttctggaggctggacgtccaagatcaaggttctgtggatttggggggttggggggaagggggggttgtgcttcctggtacatagacagcggcgctgtggatttggtgtagggggtggttgtgtttcctggttcatagacagcggtgccttcttgctgtgtcctcatgcggacgggatccctcctggaaccatcagtgccctcatgaaagagccccccaagagctccgtggcggaagaagctgatcccgcctcccaacaccactgtcttaggggtgagaattttaacataggaatttggggggatcacagacattcattgctatgggtgggaccacttggtgcgttgcccttggggtggcggtgtggtcagtggtccattcctgcccagcgccgagcagcggtctgtgcgtggggtctttgcacccgtgcacctgctgaagggtctctggagctttggctttttggcttttacgagtaaagctgccgtggtgcttggtgtgcggtgaggagtggacagaaggctctgtcctggcaggtgccctgcagtggcctgagaccgggagatgagggccggcaaggggctgtggacgagtccagagtgaggcggcatctcggaggggctcacacattgtctcaggaggagtgggctggcatttctttccagtgggcagctgttgaagattttggagccaaaagagcgttccagctcagatgtctttcaggtggagtgtggctgcaggtggggcaggctgggtcagggtggagccatgtgggctgaggcccgagttggggctgtggctttggggccacatggctgccggtcgggtgggagcgagtctctgctgaccagggccctggatgttgagccccagccgcggggtgtgaggtctcaggcaggacccaggcattcagacattgggtccactgtgtgtggacccctgcgtcccagctccaagacgctgtgtgacgggaggcggcagcagctgagttggcgcggggagacagggcgatttgaaaagcaggctgggaccaaagcatcttgaaaacccaaatgtagtcacgttgcctggcttgagtgctgtccagagcctcgcccttggcctctgtacggcagggcttaacagtggccagcacctcagggccaccagaggcccggggccacctgggcctggcttggcttccggtggcccagaactcctgctgggctcctgcctccctctgcaacctctcctggctttggtgggttatgtgggagacacgagtggcttcacccagcgggagtggtgcacatgggttaacatgccagccacccagctgtgtacgggctgcatgtgtgtgtacatgtacatgcatgtgtgcgtgcaccatgcacgtgtgtgctgatgtacatgcatgcatacatgtatgtgtgggtgtgcacgtgtgcattgtgtgcatatatgcacgttaatgcatatgtatgtgtgcatgcctgggtgcataggtgtgagccacctccctcccccatcagtgtatccatattgcctctgcagagctccatgggggtccttggcgagccagggctgtggttgtcatttttgccttccttacaaaacgcaaaacaggccgggcgcggtggctcacgcctgtaatcccagcgctttgggaagctgaggcaggtagatcacctgaggtgaggaatttgacaccagcctaaccaacatggagaaacaccatctctactaaaaatacaaaattagccaggcgtggtggcgcatgcctgtagtcctagctacttgggaggctgaggcaggagaaacacttgggcccgggaggcggagcttgcagtgagccaagattgcgccactgcactccagcctgggcaacagagcaagactccatctgaaaaaacaaaacacaaccccaaacagtagtaccgagccagttctcatctgggcagtgacctgtggcgtttcagactccttctcggccgtcttggtcttcccggcatcctcgctgagagctgaggcttgcttttctgtttcatagttgagatgtttatggcctgagggaccttgtgtcttgggtgcaaagttaccaaggggcggcgccttctgacccgagtgcagggccctcctcgcctcctgcctgcagcatggggcctgtgctggggtgcaggcttgcagtgtgtgctggtctcgtgtcaggtgtggctttcagtgtgtgtgagtgtttgctgtttccaggtgaaacacccttccaaacaaacacggagcagccatcttttgtaatagcattttgttagacatagagtctcatctgggggcagtcttgacccatgggacactggcactgtctggggacatctgtggtggtcacaattcgggggggtgctcctgagatggagtgggtgggggccagggttgctgctgagcacccctcagggcccagggttcagcaccggtcagtagagctgaggccgaggatccctggcctcagattgcatcccctccatgccaccgcccttctcttcagggcgcggtgagggaagggcgtgtgggggtccctctggggagaaggtgttttcaccttcacactcaccctcactcctcctgtcctggaacttgggtgggtttgaccttttgtggatgaggtgagggctgagaggtggattactacctgagacaatcaaaatcaattttctttcttctgaaaaggactcagggtgtttgagaaaagtactggggagaggcagctgccaccggggctccccactcgggatgtgttgggtgttttgcgagaccccccacagggagctcaggtgctgtgggcagttcctgggctttgtcgagggcctcccgaaggcagcactgtggccaccgtgggacacatgcagcctgtctcatctctaggagctgccaggtgaggggtcctgcgacaggcacctgtgcaaagatatctaccatgggcagcaaggaaggttccagaaagtaccggagggagagttgtgttggggcttgggggctttctagagcagaggctgtgagaggaagtgagctgggtcccagcaccaggcagcctttaggcagctgtgattggaacagcactgtgggcagagggcaacagcgtaggacgtgtgtggaagtggggaggtgccggaagattcagagacacagggtggtgaaggcgagcctggagaagtgggctgggggcatgctgggagggggcggtgacgcttgagtctctagggcaccgggggcctgagcaaggttaatacctgagtagagagttgaggcagtctctttttagaaattagaagttaactattgctgtgtaatggggtcaccccaaaacttcgcaacttaaattaacaaaacttatttcagatagtttctgagggttgggaatgtgggagcactttgttgagtgatcctggcttggggtctctcagaagttgtagtcaggataccagccaagcaggggccacatcatttgaaggctggactggagctggaggagccactcacaagttggctccctctagtggctgttggtgggaggcctcagttcctcaccacgtgggcctctccgtgaagctgcttgagggtcctcacagcgtggcggctgcctaccccagagcccctgacccgagactgagggcaaggaggaaggcctgtgccttttgtgaactggccttggagatggcacactgtcacttccatcacattctgtttgctagaagcaggtcactaagtgtagcccatgctcaaggggaggggaattaggttccagtatggaagggatgagcatcagagatttgtggacacactggaaaacccagcattggcatcccagcgtgtgagggtgaagaaaagtggggagacggagtctctgcccaggaggtgaccaggtgagaggcagaggcaggagaggggctggagtgaggacccccatgtcacccagaatgtgtggggggctcatctggaggctggggtggagcgacagctggccacatgggcccccttcccgatagtttttccaggctgacttgctaatccttttcatcctctggggccctgggaccatcagtgtgcccatctctgagatggggtggtagcgtactcgtctctggaagcattgtgggtattagcaaggtcgtggcaggcgtggagacgtaaaggggttcagggatgtgctcagggccacctgtggcaggcacaacggtcctggctgaccccgccacagcaccaagagggagaggggagagcctcgtgggtgcttggtgcgcagggggcagtgtggccgtggccgctgagcaaagctctggggaagggggcgcccagcccttggggtggtctgtgcagagatgccgttggggtgagtccgtctgtcagggcaccgccgccacgtctgtgtgctgtccctctggtgagcattggtcatgaactggcgtgaccgtggtggagctgcacagtcccagctgcggggccggtgccgtgcgacttgatttggcctgagaccgtgtggtctttgacgtaaataccaacaattggcccccaggaaagtgtgtccttgcagaacttctggaaaaggggtggttccagtaagaccctggcttggtggaagatgggaagggcgctttgtaaactctttccgaggagtcaggaggccgtggcgtctggtggagagacggtcagcctcacgtgccttggtttcctgtgctgggtgctgcagcacggcagggtctgggtaagagggggcagcagcacgagagtcaggccccggctgccgcccgccctcacgtgccccgtcccccaggcacgggcgagagcgggaagagcacgttcatcaagcagatgcgcatcatccacggcgccggctactcggaggaggacaagcgcggcttcaccaagctcgtctaccagaacatcttcaccgccatgcaggccatgatccgggccatggagacgctcaagatcctctacaagtacgagcagaacaaggtgagcccgcgggcgcctggggaggggagcgcctgggcagctgtgggcttggtggtgagcatggtggccgcgctgccagggtggggccatgccgggggtcccggccggcccaggctacccctggtcatccatccgttcctgtcatggacatggaaacagcaaccgctgacttcctgggggccaactggagagttgtgatgggcattgcgtggccaagccccacagcctccctcccaagtagctgtgggcgcccacatcctgtgggtggggaagctgaggccctggggaagctgaggccctgtgaggtgagccactcgcccaggtcgccttgggagtaagcagcgtgagctcctggttccggccccttccccaggctgagcagcctaccaggcacctcgtttcggccctgacactcacccatggggctgtacttctcaccttctcacactgtttttttgttttgttttgttttgttttgttttgaaaacagggtctcgctctgtcgcccaggctggagtgcagtggaatggtcaaggctcatcacagcctggaccttctgggctcaggtgatcccaccacagcctcccgggtagctgggactgcaggtgcatcaccacgcctagctaatttttgtattttttgtagagatggaatttcaccatgttgcccaggctggtcttgaactcctgggctcaagcagtcctcccgctttggcctcccaaagtgctgggattacaggtatgagccaccatgcctggcctccgccctggttttttttcttttttttttgataaagtagaggtcatttgatgccctgtttttaaatcacagctttattgagttataattcacattctatgcacttcacttgcttaaagtgtataatttggtggttttcgatatgtttgcatagtcgtgcagccatcaccgctgtcggattccagatttcattttctcaaaggaagccccttccccatcggccgtcactcccaccccctcctccagccccggcacccacacatccccttcctgcctctgtggatcggtctgtcctgaacatttcatagaaatgggattgcacgccatgtggccttttgtgtccggcgtctctcactgagtgtgacgtcctcaaggtgcatccacacagtggcctgtgtcagagcctcgtccctgttcatggctgagtcatgttccagtgcatggagggaccgcgtatttgcccatttatcccctggaggacatttgagtgccttcatgtgtgggctgttgggaacggagctgccgtgaccgtctgtggacgtgtgtttatgtggatgatgtgttcccttccctcagttgcatgctacgcctgggagcagaattgctgggtcccagggtgactctggctttgccctctgagaagcgtccagagagtttgccccagtggccgccctatggggcaggcccagcagccgtgcagccgtggctcctgccagtggcctccctggggcctttcagctgaggggccattgatcccgctttcgtagccctgctttcaggggtagggctcttgcccttagatcttggtttgccacttgccctgtctcccgctgtgatctcttccagctgtggccctctctgagagtccatattcatatttgggcttagatctccatcagcttctgaaacacgcatctgcaaactgcagactgattttgtcgataaagttttattggcacatacccatttctgccatgttgcccatggtgcttcagcagcagcagcagagccgagtgctggagacagtccgtgtggtcgggaaggctgggtgtgctctctggctctctgcagaagcagattgctgctgtctaatctggaagtttccagggagtgggatttttggggtttgtgtctctttttccaagtccccctaggtgtgcttatcccagcccagattgagaggctgggggcagggcaaggggagggctgaagtcggagtccggggcagggagcgttgctcagaggggacaagcaagggctgagtctccactctggggggcctgggagggccccgtggctcccagagcccagggcaaggctcccttctttcccatctgggtcccacccagtatgtcccctccccagtccctcagccaaactgtggctggtcatgtcggcctgtgcgccccggggacggggacacagagcatcaggaggggaaaggatggcccccccacagtgtctgccccaaagggtgttcacatgtgtgtgcaagcacgtgtctgtgcggttggccttcctttgtgacagggcagcaagctggggcctgatgccacccgccgcccagggttccgtgagggggaggcggctcgtgttggggcaccatgtaaactgttgagtgcggcagctcgggggccacacgccgtccttagcaccgggtgtggtatctgctcttgatgatgtttgataagcatttttcggacgaaagagagaagccggcggggcagaaaccgagtctggagctgcacactgcaggcgatgccgctggttgcaacgtcctgtgactgggcttcctgcctcccggtgtgtctggagaattcgaggcagcgagtgctggggctgttggttagttctgtcgtcgtgcttggtcgtgctcggcgctgcactgccctcctgtgggtcctgggtttgaagtgtgtgtgttctacacgtgcttgttccccacaccgtcccctccccacctctaagaagtgaatcgaagcccggcctccccggcaccctgcagaccgcaccgccgggaggctttgcttgtggggccttgttcggaggaaccacaccgccaggcggcctcgcgtttttctgacacgtgttcacacggaactgtcagtggtcctgactgcacagcctgcggaatgccgcccgggccagccgaggcctggaagaggggccgtcacaagctttctggtggatgtgtggccccagcgagctctcgacgtctcccctgcccgccctcgcaggccaatgcgctcctgatccgggaggtggacgtggagaaggtgaccaccttcgagcatcagtacgtcagtgccatcaagaccctgtgggaggacccgggcatccaggaatgctacgaccgcaggcgcgagtaccagctctccgactctgccaagtagtaagtgcggccgcaccgctggcggcctggggacggcagctgcgggccggtgcctgggacccttcgggaaggcctccgcggcgtctgtggtgccccctgcctgctcgccgggggcagggatgcggtgggcccgggccacctggccggatggagggaccagagcagatccctggaggggccacgccttggcaggagccggtggactctggtgtgacactggcctgcttgtatgcctggccctgccgctgccctccctgggtcaggagtgagctcctggccaccctcggtgctggagcccggcctgtggcctgtgggggaaacccagggtctcctaggagggccgtgggatgggaggtagacacaacctgggccgtctcgctcctgcctgggacatcgtccccagagccacgtctcccactagtgactggctgtgaccttgactgatgtcagggttctcccagtctctgggcctgggatagggggtgacttgtgtgctgacaggtggccgggccatggccgcaggtggaggcccccgcgtggcaggctgtgcactgctgccctccatgcttggcaggcagaggccccggccctcccccagcaccgggagagaccctaaggcgacagggacaggcctgtcccccgcccctcctgcccgtcctctgtgtgttccctgcctctgggaggttgtgggagggcccagataaccaagcacttggaacaaaacgccagggcctcctcgcggtgccggaaaggtctgagcaggcacccggcctcttacaacccccaccccaggcagaccactcgaggggcgccccactcaggactgcccagggcgtcaaaaacgggaaactgtcccaacccagagggctgggcaggaaaaggcatgaggggaaccaaggaagccggaatcaagcgtggacttcagtagctgcgctgtgtagacactggctcattgctcgtggtgggtgccgcacccacgtacagggagcagcagggagacgggcacggggatctgctgggacctctgcagcctctgcagctgcgactctcctaatgatgcgcttgtttgtgaagcctcatccctggggccagccaggcctctctcgggaagtcccctgccctgggtcaccgtctccctccttggtggccgtctctggacagctctactacaaaccccccgaaccagctggagtcctcgtcctgggactttctcttgtgctgggtcatttctgtcccctgagaccccagagaggatagaggttgggaggctcgtatcccgaccccagggtctccattggcccgagccctccgggctgcttcagacactgccgtaggtggcgcagtgcgcggtccaccccctcctggtggctttccgtcctcccgctggtttgggtgctgtgtccctgtcctgcccccccacccccggcagccggcctgagcacccaccgctgtgttgcagctacctgaccgacgttgaccgcatcgccaccttgggctacctgcccacccagcaggacgtgctgcgggtccgcgtgcccaccaccggcatcatcgagtaccctttcgacctggagaacatcatcttccggtaccgcccgggccacagcaggcggggagggggcactgagaggctcatttgcccggtgtgccggctcatgcctgcgcacccagtgctttgggaggccaaggcgggaggatcgcctgagtccaggagtttgagaccaccctgggcaacatagccagacctcatatctaaaaaaaattttaaaaattagctgggcgtggttgtgtgcacctgtggtcccagctactcaggaggctgaggcaggaggatcgctcaagcccaggaggttgaggctgaagtgagccatgatggcaccactggactccagcctgggcgacagagggagaccctgtttcgtcttattaaacaaaagaaagcccattggtcttcatcctcagtgtgtgtttgaccaggtcaggggataagatttatctctaagtatgtgtgagccagggccacacagggaaggagctgtgggggtgtggggggcgtggccacatccatccagaccggcagccgaagagacctggcagggaggacatttgacagggcctccaggacgggccgggggcctggttggagccagcatggggctggggtctggagtgctggccggagcagggggtgccgcatggtgcgggaggggtcatagggactgaggctgccaggggagggggctcatggggaccgaggctgtgaggggaggaggggtcatagggaccgaggctgtgaggggagggggggggtcacggggaccgaggctgtgagtggaggaggggtcatagggactgagtggggaggaggggtcatagggactgaggctgtgaggggaggaggggtcataggggccgaggctgtcagggaagaggggtcatggggaccgaggctgtgaggggaggaggggtcgtggggaccgaggctttgaggggaggaggggtcatagggactgagtggggaggagggctccaggctggggtggaggagctgggtggtgtggggtggattctgttcttcacgggctgcccctgcggatcctgctgggcctccggggctccaggtccactgtggctgggggccggccagcagagccgggttctccctggggaccctcagtgggtcctgtgtctggtaggctgctcagctggctggactctgctgtccctgggaacgtggaccctgcctgcctgtctcctggccccatataacatctccagcgctgaggtcccggctttatgcgtgcctgtcctgggctgctggtgtcgggcgtgagactcccaccgcaggccttattcccgcccagtgctggaggccagaaggctgagatgcaggtgtgggccgggccaggtccttctgaggctgaggggatctgcccaggcctcactcggctcctagtggcggccgcatccttggcatccttggcatccttggcatccttggcttgtggccgggttgcctcatccctgcccccatcctcatgcagcgtcctccccgcctgcgcctttgcctctgttctcttataacctgtccttggccagggccaccctacctctgtgtgacgttatcctaaccagtgacatccgcacagaccctgtttccagatcagagccgtccccgggttctggtgttcgtgcgtgtggggcgctagacggctctgtcctggagggcctcgcggtggctccggttgcgggtgccttctcctgcagtgcaagctcgccctggcactggccctcatgagggaatgacgcctccctgccagggtgtccccacccagctggtgcactgccgaggccattgtgagggttccgggaagtctgtggggttttcctcgagagccctgccttgagacccaccccagggctgggggtgccaccccctgccatctgcctgttctccccacccgtcctcccagctcggcctcccagcgcaggcagggaggatgcggcgtgaagatggaggcagggatggagcaatgtggccacaagccaaggaatgccaagctctgggatggttcccggggacccgagcaggcgctgggccctcagaagctgcggtgtcctctctggacatgggcgatggtgtatattgttacgagaattcaagtttttcttcttttttattcacacggggcccatgaccccaggatacagctgaggcgagccaggcataggccaggttgtggcatgaatgtcccctcacagccccacgctggcctcttaacagcgcaggcctctgtgtcctctgtcagaaatgtcctgtcccctccctgagctgagctcaggctgggtgtgtcaccccctctccaccatcttccaggcccttcccagctccagctgtgcccttttcttttttttgagacggagtcttgctctgtcgcccaggctggagtgcagctgtgcaatctgggctcactgcaagctccgcctcccgggttcacgccattctcctgcctcagcctcccgagtagctgggactatagacgcccgccaccacgcctggctaattttttgtactttttagtagagatgtggtttcaccatgttagccaggatggtctcgacctcctgacctcgtgatccgcctgcctcggcctcccaaagtgctgggattacaggcgtgagccaccgcgcccggcccggctgtgccctctgtgccgggtgcagacccccgtcctgagcctactcctctgccaccattgtttctctgccagccgcctctgtccaccacacgctggcagagggccggccaggtgctgtgggatgcagctggaggccttgaaggccggtgggatcgtcccagtgcgtgaggagaggctcctgctccctcaggtggggacaagacacggggggacccggatcccagccctgccggccgccgcaggcgtgcaggagaggcctcgcgctccagacgggctgtggcctggtgtcggcacacccactgtcctcccgcctggccacagctgctggtgcgggccctcttgtcccttagagtcacctggcacatctgtcatccaccggtgcctgctggactcccccgcagaccagaccaggtggatttcaccactcacatgcccaaagcagccccgctctcctcggcagagttgcagggaccccggccttccctggggcctggggccagggcctgaggggcactctccgcttctgcctttgtattctttcaaggagaccaaagtgccttttctcgttatagaaaacttagaaaagtcacaagtagaaagaggcaaacgtcccgtaaggaacgcacgcccgcagacatcgtctgagctgattttctttctcccgcctgtgcgtggcctgagagtgtgaggttgagctgctcaccacgcggggcagggcgctgcgcctgctcttctgccccaggaggataccggcaactctgccctctgcagccgtcactggagggtccctgcagggagcaactgtggcatcagtgtttactcctgcgagtgacgcttggtgaacatctgtgtccctggcccagtgaggggaaaggcttctgtgctcagggtgacatccagatgccagatgtagggtccctgggcacccatcgcaggttcccgcagcagctggcgcccagaatcctctgggttctcacacccccacactagcgcccgcttccctgggcccagtggtctcaggcccctttgccagtgagggaagggtctgcggtggtcacccctggaggcggtgcggccgctctctgagagcgtccttgcccgttctaagagtgggggctcttcctgctccagccgatgtcagtctggtgtggcaggaggggcttgggtgggagccgtcctgggattgcagattgggccttggggcgccaggtggctgagtcctggcgctgtgtcctttcaggatggtggatgtggggggccagcggtcggagcggaggaagtggatccactgctttgagaacgtgacatccatcatgtttctcgtcgccctcagcgaatacgaccaagtcctggtggagtcggacaacgaggtgggccctgccctgagcaggggcagcgttgggggccgggccttccccacctgccaagcctgggtcccctcacctgggtccccccagctgccccttgggctgtgtgcagtggggagggcccctctgattccctctgccttcgctcccgccagaaccggatggaggagagcaaagccctgttccggaccatcatcacctacccctggttccagaactcctccgtcatcctcttcctcaacaagaaggacctgctggaggacaagatcctgtactcgcacctggtggactacttccccgagttcgatggtgcgccgggctgcggcatggggaggggctcgcgggcagggccttactggggggagggggctgatatgggagaggggctcatacaggccgggagctctaagggagggcgtctgatgggaggtgtcatgtatgggagtggagtctcagggaagggagatctcgtatgaggggggcctgtacgggaatgagttctccgacgcgggtgtctcatacccgtgggagatctgttaatgcagggactccttatacaggaggggtctcgggtgggaggggtctcgggcagggggatctcgggtgggaggagtcttgtacaaggagggcaccatgggagggggagtcttgtattggtgggtcttgtacgggagggagttgtcgtatgggggtgtcctgtataggtgatcccatatgggaggggtctcacaggaagggttcacgcacactgccagcgcagccccgtggggaccttggtggtagtccctgcatcctcctctgtgccctactgcccccaccctcggacccgtccctccctacgtggcccctgccccacggggtgtgtcagggcagctgagcactgagggtcttcacatgcccagccctctctgggcctggggatggcggccaggggagggtgttgtgtgccctcgtctgtgtggtcagtggctgccgttagtgctgtcaccactcagagctgtccctgccaggcacagtgaggccctgggcagctctggcgccctcatttccaccccggatctgtgctcctcccgtgagtctcgggtgtcatcttcgggagggcccctcagggtgccctgcctctggatgtgcagcgagagggaggggtctggcacacggtatagcctcggccgctggctgcaggcgcagggccctgctgtccctgggcaggggagtggcggggggcgctgcacctgctccagccgcacgtggcccctgcccagcagcctgtcctgtgggctcagagagccctggtggggggaggccaagggactggggcatagacccctgtcccaccagtccccagagcagccccttgaacacccccaggggcctttccaccggggcaggcaggagttactgggcgggtcgcctgcattgtccagggtggtggaggggcaggggtggccggtgggaagcagcgcccctgctggagcccctggatgtctctgaggcctggctgcagcaggggcaccgtgggtgggtgggggccactgttcctgctctgtaggctctgtgcccagccctgggggcctctcctctcaccctgggccttcgcagggcagccatgccagaggcctgccctggaaggctgtggctgtggagctgagtggatagaggccggcagagggctgagcagagggagcagcggtgggtgcagagccccaggttggaggcctgggccgtgacagtagtgccctggggctacagtgggattggcaccgcagctcacctggggagggaggggagctgcggcccgtcaggcatgcagtgggctgggggtcgagctgggtgggccgtgggccttactcgctcatcccctgggagtgacaaaggggcccacgagtcccttgccctgggccgggctggggcacagcctcaccctctgccctcccccaggtccccagcgggacgcccaggcggcgcgggagttcatcctgaagatgttcgtggacctgaaccccgacagcgacaagatcatctactcacacttcacgtgtgccaccgacacggagaacatccgcttcgtgttcgcggccgtgaaggacaccatcctgcagctcaacctcaaggagtacaacctggtctgagcgcccaggcccagggagacgggatggagacacggggcaggaccttccttccacggagcctgcggctgccgggcgggtggcgctgccgagtccgggccggggcctctgcccgcgggaggagatttttttttttcatatttttaacaaatggtttttatttcacagttatcaggggatgtacatctctccctccgtacacttcgcgcaccttctcaccttttgtcaacggcaaaggcagcctttttctggccttgacttatggctcgcttttttctaaaaaaaaaaaaaaaagaaagaaagaaaaaaagcaacgaaacataaaacacacaagcgccccgtgcccccagtgactctgggcctcacagagcccccgccagccagcatggggccccgccctgcagccagtcacgcgcccccacaccgcagccccccgtggctgtccttccaaccccacgtgctttttctttctcctgcccgcttcttttcttcatcacaaaaggcgtggagactcggagacggacgtttttccccttttttaagttattgacgcccagcgcgcctcgcctcttcacccatcaacgctgtgctttgcccactggactcctgaagagggggtggggggctccctcggtcgcccaccctgggaagtgcctaaccttttattttattttatttttttgaggaaaaagaacgcctgactcacaggttgaagaaacaccctgggccctctctcatggccgggttccccgtccctctgcagaggctgggaagggtccccgggctggagccacgggggcttctctgggctgtgcctccggggccaacactggctgcttggggctgcccggggactccagagggctgcacggccaccctgccctggctagagcgcaccccaccggagcccacgtgggctgggcggctggagggatggtcccccggtgacactgggagaaaggccacttggatgggggcgtttctgttttgttccgctttgtgatgtcaccaatttggaaacagcgagggtgggtggggacttttacagaatattctcaggtgtgtacccgagaggcagagagagggacgtggccggcagctctgtgcgtggccttgtcccaagcacttgcgcccgcccccgagcgccgcccccggggagcgggaagccagcactcgcactttggccaggggcgcgtggaaggtggtggcaggcaccggcctgggcagcttccaggcctggctggccacgaccacggcccgagggggagcccgccaggccacgccgcactgagccacagccccgggggccgcctcccggggccccttgaggcactgaggcaccgagactggttctccccgagagactcggaaggtggggaacgaggggactgtgtttggggaggtggctttttcgtctgctgttgactgaacactacagcgccctgtggttccgggcttcgcacagctgtcccagggatggatcgcctgtgctgccttcgcccgccgccacaccgggaccctgcacggctgcttctggcctcgacagatgacaaaagaaacagccccaaaatacgaccactccaaccagcagttcccgcctgcctgcccgccactgtcaggcctgccctggcctcctcgtccgcagggctgtctgctggcttctgggggcagaagagcggggagccccgtggaagggtcaggggagaccaggtcagggcagctacatttctggtgatcagccccatggggagacggggctggcgggataccccccccccggcttccccacaccacttctgtctcacccggaagcgtcctttttttgtgccaggtgtctacctaagagggttggtgccagaagccccccatggcgagtgctggggcccggcggtgccctgggggagcagatggggccacccctggcagggccgctacaaccttttccagcagcggagccctctggggggcctgtgcttgtggcatctctgagggcctagattgcacaaggtgacctggccgtggcctgagggtggagtcgcccagcacgcaggccggggcgctgcggggctaagtattaggccttcccagggagggggcgtgccaagcatcccagagccgggctgggaccgccaaaacgtcgtggcctggatcctctgggtctgagtgcctgatcccctgccccccaaaaaagcagaggtaggtgttgcaggcccagggcaggggtgcctgccccaggagagtcccaggcagtggttctcgtgccagtggcacccaggggcaaggacagccaacccccacccttgccacgtgtggggccacgtgggcatgtggggtgtgtgtttttaccttggtgaatctcacctgccaacgatttctcgtgagtgccgaccaccttctccgaccatgttacgcccgggcggcagcagcccccggccactgcaaacccatgccctgggtcccccggctcccccagggaggcatccccgtgccaatgtcccccagtggtggcagcagatcctgtggccggcctggcggacgggacccagtgatacttgtatattacacagtcctgatttcagacaatttcaaccttaatctatttaaaaaagaatattctatacaagctgtttttaagccttttaccatttgaaatgcatgtgttgtgcgcgttggggatgggaggaggggctgaggagcggctcagtgtcacctcccacagccaccggccctgacccttaatccagacaccgatggaagtcgacttttcatatctttctcctgaaatgaactctgttttaaattggaataaattttgttcctaaatgctggcggcccccttctggtttatttcctgttgtccttcaaagggggctggggggaagtgtgcagaggcctggcccccaggagccctggagttacctagggcattgcctgacctcagtggggccgcctgggtgcctccgcacggtgtcccggggcccctcccctgtcatcttgtttgacccttcacttcaagttcatttcactagcaccaggccagagcaacctgcttgggaaatgccaccttgtttgggggctggggacaagggagtgagacggggaggagcccaggtcccaggccagcctgcccctcaccttccagggcacctgtggggacatcatgccctccgggcctccgtttctgtaagctgcggatgtgggacctctgcagccttccttcagttattttttccttttgaaaaaaaattgtaaaatacagataaatttctaagtgcacagctcagcggcattaagtgtatccacacggttgtgcagccatcaccaccatcctctccagaacttgtatctccccaaattgaaactctgtccccatgaaacactccccgtccccctccccagcccctggcaccccccatcctaccttttgtctccctgaatctgacagctctatggacctcctaggagtggaaccatgcggggtgtgtccttctgtgtctctggcatctctcactgagcatgatgtcctcaaggtgcatccacgctgaagcccatgtccggattcccttccttttcgtggttcagtaatattccactgtgtggatgggccacgctgtgttgatccatctatcatcgatggacgtctgggtggtttccaccttgtggctgttggcagtcgtgccgctgtgcacctgcgtgtgcaagcttctgtttgagtccctcctgtctgtcctcgtgtgtgtgcatccagaggtagcattgctgggtcctctggtctttctttttttggatgcaccttgaggagtctcgctctgtcgccaggctggaatgcagtggcgcgatctcggctcactgcagcctccacctcccgggttcaaccaattctcctgcctcagcctcctgagtagctgggactacaggtgcctgccatcacgcccggctaatttttgtatttttagtagagatggggtttcaccatgttggccaggatggtctccatcttgacctcatgatcctcccacctcggcctctcaaagtgctgggattacaggcgtggaccaccgcgcccggcctctattttaattttttggggagctgcccgacttttccacagcagctgtgccatgtcacatcccgccagctgtgcacaagggtgcgatttccccacatcctctttcagtttcattgagtccgataggcctgtccgtcaggcttaaggccccttgctgtgcccgatgctgccccagatactacagtgcagcagagaaggtggcacttaccagcacgacttcacctaggaagagaaatggagcagggaagtgggacaggatggggagatggtggctgttgcttttcttttctttttttttttttttgagttggggtctagctctgtcacccaggctggagtgcagtggtgcggtctcagctcacctcaacctctgcctcctgggttcaagcgattctcctccctcagcctcccgagtagctgggactacaggcgcccaccaccacacccggctaatttttgtacttttagtagagacggggtttcaccatgttggccaggcttgtctcaaactcctgacctctggtgatccgcccgccttggcctcccaaagtgctgggattataggcgtgagccacagcgcccagccaatggtggctgattctggtgggctgttcctggtgggctgtacaggaaaagcctgataaagtggtgcgtgagtagcatcctgggagacaggaagggaaggagccatgctgtggcctgagggtgagccaggcagaggcacagcttgtgcaaaggtcctggggcaggaccatgcctgatgtgttggaggagcagcgaggaggcccgtgtggttggagcggagggagggggggagggcagggagggttggtcttttaccctcagagggaggtgggagccctggagggacgcaggcagagcagagacaggacctgacaggtgctcacaggcggcctctggtggctgctgctgggaggacagacgggtgagggcgggagccaggggacaaggctggtgcaggtggcaatgataggtgtggatcagatggcagaagcagaggtgggtgagtcagctaaggggcgttgagtgctggggggagctgggcccggcatggatatcgcaggtgcatatagtgcccccagtggccagcaggagtcgccccagacagctccttgcctgcccctagccccctgcccatcctaaaaggaaaaccgaggcacagagggtgagcgtcttgcctgaggcagcttgccctgacggctggccagtccttcctaggtcctgacaacagccctagcctgttcagctgggcaggcagctccagcaccccccgcagaatccataggacccggagcaaaatgaaaacacagggtccctgtttaaaaattccgaggaggccgggtgcagtggctcatgcctgttattccagcactttgggaggccgaggcgggcggatcgtttgaggtctggagttcaagaccagcctggcctacatagcgaaacctcgtctctacttaaaattcaaaaaattagccgggtgtggtggcgcatgcctgtagtcccagctacttgggaggctgaggcacaatgatcgtttgaacctgggaggcaaaggtagcagtgagccgagatgatgccactgcactctagcctgggcgaagaagtgagactcctcaagataaataaataaacaaataggccaggtgcagtggctcatacccatctctactaaaaatacaaaaattagtcgggcgtggtggctcacgcctctaatcccagcattttgggaggctgaggtgggtggatcacttgaggtcaggagttcgagaccagcctggtcaacaaggtgaaactccgtctctaccaaaaatacaaaaattagctgggtgtggtggcgggcgcctgtagtcccagctactcaggaggttgaggcaggagaatcgcttgaacccgggaggcagaggtttcagtgagccaagatcgtgtcattgcactccagcctgggtgacagagtgaaactttctctaaaaaaaaaggtggctgggagtggtggctcacgcctgtaatcccagcactttgggaagccgaggcgggcggatcacgaggtcaggagattgagaccatcctgactaacactatgaaacccggtctctgctaaaaatacaaaaaattagccgggtgtggtggcgggtgcctgtagtcccagctacttgggaggctgaggcaggagaatggcatggaccggggaggcagagcttgcagtgagccaagatcgcaccactgcactccagcctgggcaacagggtgagactctgtgtcaaaaaaaaaaaaaaaaagcaaaatcttagagttattggaagtgtaaattggtgcatgcactttggcaaaagatagttaatatctaggaaatactttataacccagcaattctaccattgggtatttacctacagaaagccacacatataatcacaaaagacatgtaccaaatgcccatagctgccctattcattacagccccaaactaaaatttaaccaaatgcccatcaacagtagaatggatgaatagattgtagtttatttatccagaggaatagtctatgacaatcaggattaatgaaccacaaccatgtacacaatatgagttaatcacacaaacatcacgtggaatgatagaagccagatgtacctgaactcattttatgtaattctgtgtgcataaagttcaaaactggcaaaaattcaccatgattttgaggattttttttttttttttttttttgagatggagtcttgctctgttgctcaggctggagtgcaatggtgcaatctcggcttactgcaacctctgcctcccaggttcaagtgattctcctgtctcagcctcctgagtagctggaattacaggcacctgccaccacatctggctaatttttgtattttagtagtgacagggtttctccatgttgtccaggctggtcttgaactcctgacctcaggtgatccacctgcctcagcttcccaaatttttgggattacagctgtgagccactgcgcctggcctgaaaggtctaatattttaagcttctactcccaagaaattagaaagagaagagcaaactaaacacaaactaaagagaaaataatagaatagaaatcaatggaataaaaaatagaaaaacagtatagaaaaatcaataaagccataagctggttctttgaaaaaaattaatgaaattgataaacctttagtctagattcaccctccagagagaaaaagaaattaccagcaacaggcacaaaggaggggatatcattactcaccctaaagaaatttaaaggataataagggaatactacaaataagtgtatgcacataaatttgacaacttaaaggaaatggaccaatttctcgagagacacaagctaccaaaactcactcaggaagaaacagaaaacctgaacagtcctatacgtattaaagaaacagaatttgaagttaaagtcttctaaagaataaaacatttgggaggctaaggcgggtggatcacgaggtcaggagatcaagaccattccggctaacgcggtgaaacctcgtctctactaaaaatacgaaaaaattagctgggcatggtggtgggtgcctgtagtcccagctatttgggaggttgatataggagaatggcgtgaacccgggaggcagagcttgcagtgagccaagatcatgccactgcactccagcctgggtgacagagcgagactctgtctcaaacaacaacaacaataaaaaatgaaaaataaaataaaactttaggcccagatggttttagtggtgaatcctatcaaacatttaaagaaaaaataacatcaaattcttcacaatctgtttcagaaaatagaagaggatggaatacttcccaactcattttaagaggccagtattatcctgataccaaaattaaagacagtacagggaaattacagatcagtatactcaaaaacatagatactaaaatccttaacaaaatattagcaagtgaaataatgaaatccagtgatatacagaaagaaaaccacctcaccaccaggtggcatttatcccaggaatacaagacaagctcaacattggaaaatcagtcaatataacttgccatattaacagacgaaagaaaaactacatgatcatatcaatagataaagaaaatacatttgatacaattcaactttcattcatgataaaaattctaagcaaattaggagtagaaaggaacttcctcaacctgataaagggcatctgtaacaaaccacagctaaacaacaacaacaaaaatactattggccaggtgtggtgtctcatgcctgtaatcccagcactttgggaggctgaggtgggtggatcacctgaggtcaagagttcaagaccagcctggccaacatggtgaaacccccgtctctactaaaactacaaaaattagctgggcgtggtggcacatgcctgtaattccagctactcgggaggctgaggcaggagaatcacttgaacatggaagggggaggttgcaatgagccaagatcacgccattacactctagcctgggcaacaagagcaaaacgctgtctcaaaaaaaaaaaaaaagaaaagaaaagaaaaaaaagaaaaaaatatgtacacaaatgtatatagcagctctgttcatgatcacctcaaactggaagcaaccaaatgcccctcacggttggataaaggggaatgcatccacacagggaaataccactggaccatccaaagcaacgaacttctgatacactcggcaacacagaggaatcgcaaatgctaactgaaagaagccagtctcaaaagctactttctggaccaggtgcggtggctcacgcctgtaatcccaacgttttgagaggctgagctgggaggccaggagctcctgagcagcctaggcaacacagagaaacccatctctacaaaaataaaaaaattagggccgggcgcggtggcatccgcctgtaatcccagcattttgggaggctgagataggtggatcacttgaggccaggagttcaagaccagcctggccaacagggcggaaactttgtctctactaaaaatacaaaaattaggcgggcacggcggctcgcacctgtaatcccagctactcgggaggctgaggcagaagaattgcttgaacctgggaggtagagcttgcagtgagctgagatcgtgccactgcactctaacctgggcgacagagtgagactctgtctcaaaaaaaaaaaaaaaaaaaaacattagatggtggtggtgcgcagtactcggaaggctaaggtgggaagatcgcttgaacccaggaggtcaaggctgcagtaagccatgattgcaccactgcactccagcctaggcgagagagaagggccttgtctcaaaaaataaaataaaaaacatagcaacagctatttccctcggagcgagcgggggcggcggcctgtgcagcaacggccaggatcaaggcccaagaccttctcgggaagaaggaggaggagctgctgaaacagctggacgacctaaaggtggagctgtcccagctgcgcgtcgccaaagtgacgggcggcgcggcctccaagctccctaagatccgggcgcggtggctcacgcctgtaatcccagcactctagggaggccgaggcgggcggatcacgaggtcaggagatcgataccatcctggctaacacagcgaaaccccgtctctactaaaaatacaaaaaaattagccgggcgtggtggcgggcggctgtaatcccagctactcactcgggaggctgaggcaggaggatggggtgaacccgggaggcggagcttgcagagagccgagatctcgccattgcgcttctgcctgggcgacagagggagactctgtctcaaaaaaaaaaaaaaaaaaaaaaaaaaaaaaagatccgagtcgtccgcaaatccattgcccgtgttctcacggttattaaccagactcagaaagaaaacctcgggaaattctacaagggcaagaagtacaagcacctgcacctgcggcctaagaagacacgcgccgtgcgccgcccgctcagcaagcacgaggagaacctgacgatcaagaagcagcagcagagcgagcagctgtccccagtgcggaagtgcgcggtcaaggcccgagtggcgcgttgtcaataaagcacagctggctgagaaaaaaaaaaacaaaaaaaaaaacaccaaaacaaacaaacaaacaaaaaacacagccacaaagagccaatccacggtcaggagggagttgttccggtgatggaactacattctgtatcctgtttatagcagtaatttacacgaatctctacagctgttaaaactcatagaaaccaggccgggcgcggtggctcacgcctgtaatcccagcactttgggaggccgaggcgggcggatcacgacgtcaggagatcgagaccagtctggacaacatggtgaaaccccgtctctactaaaatacaaaaaaaattagcccggcgtggtggtgggcacctgtagtcccagctattcgggaggctgaggcagcagaatggcgtgaacccgggaggctcagcttgcagtgagccgagatcgtgccactgcactccagcctgggtgacagagacagactccgtctcaataaataaataaataaataaataaataaataaactcatagaaccatacaccaaagaaagtaaatacaatgctacataaatttagacaattaaaaacaagatctttttttgggggggacagacccttgctctgtcaacccaggctggagtgcagtgggtcaatcatagctcactgcagcctcaacctctctggcctaagcaatcctcccaccttagcctctggagtacctgggaccacaggcatgagccaccacccccggctaatttattttattttattttttagaaatggggtctcactgggaaggtggaggttgcagtgagctgagaccgagccattgcactccagcctgggcaacaataacaaaacaccgtctcaaaaaaaaaaaaaaaaaaaaaaaagaaagaaagaaagaaaaaagaaaaaaagagatagagtctcactatgttgcccaggctggtcttgaactcctggggtcaagcaatcctcccacttcagcctcccaaagtgctgagattataggcatgagccaacatgcccagctgaaatagatcttattagcaaaaaataccccccaaacccggaaataaatattaataccacagaagtcagaatgatagttactgctgggaaggtagagattactatgaggaaaacactaggggtctttgtggggctaaggtctttttttttttttttttgagacagagtcttgcttgtcacccaggctggagtgcagtggcacgatctcagctcactgcaacctccacctcccaggctcaagcaatactcctcccccggcctcccgagtagctgggattacaggtgtgcaccatcacacctggctaacttttctatttttagtagagacggggtttcaccatgttgtccaggctggtcttgaactcctgacctcaggtgatctgcccaccttggcctcccaaagtgctgggatgacaggcgtgagacaccgcgcccggcctgaaaatgtccttagtcttggcctcagtggattctgtggataccggcttcacaacaatttattaggtaatacattcaggttttatgtgttttctgaaagaaatattttctacacacacaagctcaccctggtgttcccagctgagctaataatacacgacaaatgctcagcatgtggcaaggaagtagctcagcccgtttagggaaccgcaagggaggtttgttcagcagctggagaagtgggcagagcctgggccctggatccagggagccggctcattaattctgaagccagcgggagccacagagggtctgccaccctggtccaggctgtgaagatggcgggtgctggtatcctgtccaaaaatgccgcagggagatgctaggagagtggccccctgggctcaccctgtggggcctgtggctcagcctcgtctcccagttttgctggtcatttctgtttcaaccatcctggaagatctgcacggccatgacctatttctgcgtttctttgcctgtcctgggtgggactgcccctcgttgctgctatccggttgggggcgggaaggtgggtggctgggtgggcagatggcacctgccagccccagtgaccagatgggggcccctatcgtacttcccatctgtcattcgttatgaatcaacagtggagaaaaccacacgtttgtgctgagctggtgaagctgcgtcaacggctgtcaccgagccctggtgtctgggaggaggtggggacggtggctgccaatggctgtgtggccctgggcacgtaattcgccctctctgtgccttgccctatctgtaaagggaccagaggcccccgaagtacaagaattacgtgtatctcttggggaggagagttttgatccagaactttctagaattttctacagcctgtcaatgggggtggggaatcttcacccaaacactctggctctgagtacctaggaagcagcaacgtttctaccaagctgccagccaccagcccacccctagggccctgaagtcccagagggatcaggtcagggcggcctcatggcactcattgggaagatctccttgaccagtgaggtccactcccaaagtccctcttacacccgatctgcctgtctgacttctgatcctgaatatcacttgtctgtgcgacctttgttgatccatttagagcaatgaccttgaaccttccccaacaacatctctgcttaatttttctggcagaatttttcaccatccaacgggctcaggtgtattaaaaaatatatatattttacacgtgtgtgtatatatatacacacatatatatttttatgtataatatacatatatgtatattaaaatgtatacttttatgtgtgtatatatgtatgtgtatatatgtatgtgtgtctatatattgtgtatatatatgtatgtgtatatatgtatgtgtatatacatatatgtatgtgtgtctatatattgtgtatatatatgtatgtgtatatatatgtatgtgtgtgtgtgtatatatatacatagagagagagggagagttttgttttgtttgtttctggagacagggtttcactatgttgcccaggctggagagcagtgttatgatctcggctcactgcagcctccatcttcggggttcaagtgattcccttgcctcagcctcccaagtagctgggactactggtgcgtgccaacatgcccaactaatttttgtattagtagagatggagtttctccatgttggccaggctggtctcaaactcctgacttcaagtgatcctcctgcctcggcctcccaaagtactttgattacagatgtgagctcccgcactcacctggccaaattttttattcttttattttttattttttttgagatggagtctcacttcgtcgccaggctggagtgcagtggcacgatctcagctcactgccacctctgcctcccgggttcaagcgattctcttgcctcagcctcccaagtaggtgggactacaggcgtgcaccaccacgcccggctaatttttgtatttttagtagagacggggtttcgccgtgttggccaggctggtctcgatttcttgactttgtgatctgcccgccttggcctcccaaagtatagggattacatgcgtgagccaccaggcccagcctaaaatttattttattatctgttctttaactagaaccttaggtaaggaggtctgggatctgtgtctcttggctaccgtgcctggcacacagttggcgctccatgaatgcacgcacaatgaagggatggccctgcctggaatctgcctggtaggcgtctagactctggggccccgcaggtgagggataggctcccggctctgccttgtgccagccccaccggtcactcccctgctctatgcctcaacctcctcatcagtcaaacagggatgacagtagtaactatacagggtgatgtgagtgtaaaaccagctaatgtgagccaaaacccggctaatttttgtatctttagtagagacagggtttcgccatgttggccaggctggtttcgaactcctgacctcaggcaagctgcccacctctgcagggtggatcacctgaggtcagggcagagtcgctggaaacagtccatgacacctggcctgagctgtttcttaaaaatatatcagaagggccgagcgtggtggtttatgcctgcaatcccagcactttgggaggccgaggcgggtggatcacctgaggtcaggagtttgagaccagcctggccaacgtggtggaaccctttctctactaaaaatccaaagttagcccggcgtggtggtggatgcctgtaatcccagctactcgagaggctgaggcaggagaattgcttgaacctgggaggcagatgttgcagagtcaagatcctgccactgcactccagcctgggcaataagagtgaaactctgtctcaaaaaaaaaaaaaaaaatatatatatatatatatatatatatatatatatatatatatatatatacacatatatatatatacacacacatatatatatgatatatatataatgtatcagcagtagcacgggtctgacggttcctgattggctccgaggagggggacagctccgggtgaagcctgaggagaatccgccccttctccagaaggaggaagaagggccctgctggtcacacaggacccagtctgcggtgggggttttcccgccaccgccccgccctccctggggcccccacctcaccctctcctggcacccttcaccgtcaacctgtcgggccgggtctgagcaggtctggaggtgggcggggagccctggcctccccacctcctcccgtccccaccctgttcccagcactcaagccttgccaccgccgagccgggcttcctgggtgtttcaggcaaggaagtctaggtccctggggggtgacccccaaggaaaaggcagcctccctgcgcacccggttgcccggagccctctccagggccggctgggctgggggttgccctggccagcaggggcccgggggcgatgccacccggtgccgactgaggccaccgcaccatggcccgctcgctgacctggcgctgctgcccctggtgcctgacggaggatgagaaggccgccgcccgggtggaccaggagatcaacaggatcctcttggagcagaagaagcaggaccgcggggagctgaagctgctgcttttgggtgagtccagggtcggtgggcggtgggtggtgggcagtgggcggtggccagccggcaggggtgtcggggcaaggaggcggatcaggctaggtcagacattggcatcgtggagccgtcgcctcctcccagggaatggggagcctggaacccattttccagatgagaaagactgaggttcagagaagccaagttccttgtccaacgtgcgaccagcggccaggtgcccaggcctgtccactgtgtggggcatatacaatagcagacgtggctctaccgggcccctgccgggcaggcccagcacgccctacctgtctgtgtcatggcgagggaatgatgagctcaggtgtgcaacccgttctggccagcccacccgtaagggaggggccggctccagcctctccttcaccaggacgctccctctcgcctttacctccctgccatggctggagagggcttgtctagggctcctttgggggctagaaaggatggattgattggttcattggttcattcattcattattcattcatttaagatttattgggtagctcccaggaacgaggcagccaaacaggggaagatatttctgtcttcctggatctcatttcctgtgaaggagccaagacatttagtctgtaaactcataagcagataaaataattctggcaacaagaattatctaggagaaaacaaaacagggtgatggcttccatgcggaggcttcagatgggggagtcgacgtcagtaacggttcaagattctgaactctggctgggtgcagtggctcaagcctgtgatttcagcactttgggaggcccaggcgggtgggatcacttgaggtcaggagttcaagacacagccaggccaacatggtgaagccccgtctctactaaaataccaaaaatttgccaggcatggtggctcatgcctgtaatcccagcactttgggaggccgaggtgggtggatcacaaggtcgggagatcgagaccagcctgaccaacacggtgaaaccccatctctaccaaaataccaaaaattagccagatgtggtggtgcgtgcctgtagtccctgctactcgggaggctgaggcaggggaattgcatgaaaccaggaggtggagactgcagtgagctgagatcatgccactgcactccagactggcgacagagtgagacgccatctcaaacaaataaacaaacaaacaaaaccaaaaattagctgggcatggtggcacacagctataatcccagctactcgggaggctgaggcatgagaatcgcttgaacccaggaggcagaggttgcagtgagctgagatcgggccactgcactccagcctggatgacagagcaagactcattgtcaataaataaataaatataaataaaataaataaataaatcatgcctgtaatcccagcactttgggacgccaaggcgggcagatcacttgaggccaggagttcgaaatcagcctggtcaacgtggcgaaaccccgtctctactcaaaatacaaaaaaattagccgggtgtggtggcatgtgcctgtaatcccagctactggggaggctgaggcaggagaatcgcttgaaaccaggaggtggaggctgcagtgagccaggattgcactattgcaccccagcctgggcaacaagaacaaaactccgtctcaaaaaaaaaaaaattctgatctctgaaacctcggggtcttctcattcccgtagcttgtttccccaattacctttccctgattatggccccgttggcctaagcccgggatgctagcctgggagggtcttctgggatccccgagctctgggttgggggctggagaaggtctcaagtcttctggactcgcgtttgtctgccccgggcaaagagcttgatcatcccgtgatggttgctatcgtcctttcctcgttcagtgggaagaggccgcccgagaggaaagagagagaacatcgagtgggatggtggggacccccaggaactgcaccttcactgggggccctttctttcttttttcttttcttatttttatttttatttttttgagacggagtcttgctctgtcacccaggctggggtgcagtggtgcgatctcaactcactgcaacctccgcctcccgggttcaagcaattctcctgtctcagcctcttgagtagctgggattataggcacgcgccaccacgcccagttaattttttttttttttgtatttttagtagagatggggttccaccatgttggccaggctggtctcgaactcctgacctggtgatcaacccgccttggcctcccgaagtgttgggattacaggcgtgagccaccgcgcccagcctctttttttttttttttctttttttttagattgagtcttgctctgtcccccaggttggagtgcagtggtgagatctcagctcactgcaacctccgcctcctgggttcaagtgattctcctgcctcagtctcctgagcagctgggactactggtgcgcactaccacacctggctaatttttgtatttttagtagagatggggtttcaccatgttggccaggctggtctcgaacccctgacctcaggtgatcctaccaccttggcctcccaaagtgtggggattacaggcgtgagccactgcacccagtcaagggccctttcaactctagccttgatccctcttactgaacgagataaaagaatatctcagcagggcatagtggttcattcctgtaatcttagcactttgggaggcctaggtgggaggattgcttgagcttaggagtttcagaccagcctgggcaacttagcaagacccagtctctaaaaaaaataaataaataaaataattagccaggcatggtggtgcgcaactgtagttccaactacttgggaggctgaggtgagaggatcacttgagcctgggaggttgaggctgcagtgagctatgatcatgccactgcactccagcctgggtgacagagcaaagctgactctgtctcaaaaaaaaaaaaaaaaaaatgccgggtgcagtggctcatgcctgtaatcccagcactttgggaggccgaggtgggcagatcatgaggtcaggaggttgagaacatcctggctaacacgatgaaaccccgtctctactaaaaatataaaaaatcagggctgggtgcggtggctcacgcctgcaatcacagcactttggggggccgaggagggtggatcacgaggtcaggagatggagaccatcctggctaatgtggtgaaaccccatctctactaaaaatacaaaaattagccaggcgtggtggtgcgcacctgtagtcccagctacttgggagggtgaggcaggagaattgctctaacttggaggcagaggttgcagtgagccaagatcacaccactgaactccagcctaggcaataagagtgaaactccatctcaaaaaaaaaaaatctatctatctatctatctatctatctatctatctatctatatttgacatattaatgtgtcatattatgtcacattatgacgtatcatatcgatatgtcttattattttaaataaatagggctacttaggctatctacttcttcttgtgtgggttttgatcatttgtgtctttcaaataatttgtccattttgcctgtgttatcaaatttattggcataacatttataacgttcccttgttctcctgctactgtctgtaggatctgcagtgatgtcctctcttttgctcttggtatcgatcatttctgcctttgctcatttttttcttgatctatcaagctaggggtttatcacttttagtgctctttcctcgaatacctcaaggtcatttatccctgacctttgcctggctggccctttcactccatgtaggtctcaacccaagtgtcgcctcctcagagaagtcttccctgactaccctagctataaagacagtcctatcttctccttccccttactctgtttgatttttcttcctggccctcactatttgttcacttgtttattgtttatctctccagctatacagcaagcaacaaaagggtagggaccacatctgtcttcttcatccctgtgtctccagcatctagcacaggtgtacaatgagcctgccatatagtagatgctcaagaaatgctgaatgaatgaatgaatgaatgaatgaatcatttttggggagaacttcccccagacactgtatcatatcttcctggagctgggaaagtcccttccacataccactctgggcactactcagccagcctcaaagcaggaagccccttctactgatggagggcaggggatgacatccatgtccccaggcactgatgtagcactgtggactgtggtttaaaccacctcatccctggagacaggtctgagggcaacctccagacctctgtcccttcttggaaacaggaattgaatccaaaagctgttttttttttacctggaggtggctgatccttttgaggaagatggcaaaaaggaccagggtgggggtgggtctgtccctgacatgaagcaaccctcatattggggaagggggagagtcagaatgaagccgtgagccgggtatggtggcacatacctgtagtcccagttactcgggaggctaaggcaggaggattgcttgagcccaggagttcaagaccagcctggacaacattgcgagacccagtctctaaacaaaaacaaaaaaagaaaagaaaagaaagtgaacaacaacaaaaacaggaaaataaagctgtgaaagggaccagttatgtccttagcactttaaacattttattttttatttttatttttgagacagagtcttactctatcaccccggttggagtgcagtggtgcgatctcggctcacggcaacctttgcctcctgggttcaagcaatcctcttgcctcagcttcctgagtagctgggactacaagtgtgcaccatcatgcccagctaatttttgtatttttagtagagacggggtttcaccatgttagccaggctggtctcgaactcctgacctcaggtgatccatctgccttggcctccccaaagtgacgagattagagatgtgagccattgtgcccggcctgttcttagcactttgaggcaggcactcctagtttcccccaaaggataaactgaggctcagagaggcagagcgacttgcccaaggtcacacagctgagactcgcacctagaattctggttccaaagtccatgctcctgactgccctgttcgcctgccttgggggacagaaacaccacagaaccccagtgccagatggggaaaatgaggcccaaggaggcagcaggattgattgggggtcagcagctagtttgagccagagcgggactgagaggccgagcctcctgcccctgcggctgcctggcctggctccccacttccccagcagctgcgtttcctgtgagggcctggtgctggactctgtgcacatagctggctccagttgccttgtgatgactggggcttggcacggttaacccagttccttcctggcatctgccggttccacttcctcctgtcctcctccgtgcccaggaggaagcaggaacttcccgtctgggccgcatggcctttgggggtatcctaaaacagatcactcccaccatttctatccaggagctgggggatgtctgggggtcggggggcaatggagaggtcccagaatcctttgtggcttcaggacagcaatggattgcaaagagggggttctcacgcagctcttcaggcttcgggtgatgacccatccctgagtcatcaaatctgtgtcgcgggtggcaacaggattatcatttatttcctataacaaagcagaagaggaaaaaaaaatcagtgcatcacaaaataaagccaactgttgcttgccaagacttatgtttgttctctgcactttggggcaaactaagatctgagagttggaagacaactgggggacaggagcccaaaaggtccagtcctggctgggcgcggtggctcaggcctgtcatcccagcactttgggaggctgaggaggggtggatcacttgaggccaggagttcaagaccagtctggccaacatggtgaaacctcgtctctactaaaaacacaaaaattagccgggtgtggtggtgcacgcctctaatcccagctgcctgggaggctgaggcaggagaatcgcttgaacctgggaggaggaggttgcggtgtgctgagatcacaccattgcactccagtctgtgtgacagagccagactctatatcaaaaaataaaaataaaaacaaaaagtaaaaaaaaggaagaagaagatctgagggttggaaggcaattgggggacaggagctcaaaaagtccagtcatcggcagttgggctcaatgccacaccccaaggagctgtcgagcctcccagactctgtaaaaacattgctttaacagacgtgttaatgacacctaccccagctcgactggccgtgtcccattttgttggtgaaggactcacacgaccccaagtttactcccctggggttccacttgctgtgtgacccaaattaagtcactaaacctctctggtcctctgtgtctcatctgcaaatgggaaaatcatagaatctgtgaggattaactggggatccgtagagtctctgggctcggggttgggaagacggtaagatttaaatcatgctagctgtgatttttattatgattgttataatcattcaggcagggtaaaggaacctccaggtataataatttagaaacccataagctcaaggtggctcatgcctgtaatcccagtactttgggaggccaaggcaagtggatcccttgaggccaggagttcgagaccagcctggccaaaatggcaaaaccctgtctctactaaaaatacaaaaattagccggacacggtggtgcacacctgtaatgacagctagtctggaggttgaggcaggagaatcgcttgaaacccatgaggtggaggttgcagtgagccaatatcaagccactgcactctagcctgggtgacagagtgagaccctgtctcaaaaataataataataataaaaaataaaagcccataggctctagactcaaacagaactgagtttgaatcccagtctgccactcaccaggaccattgaaggaattgtgcgacccacagcaattccctcaacggccccgagactgagtttccccacatggaaacagggctaagagttgtccctctcttggccaggcgcagtggctcacgcctgtaatcccagcactttgggaggacgaggcgggtggatcacaaggtcaggagatcgagaccatcctggctaacatggtgaaaccccgtctctactaaaaaaaaacaaaaaaaattagctgggcatggtggtgggcgcctgtcgtcccagctgcttgggaggctgaggcaggagaatggcgtgaacccgggaggtggagcttacagtgagccgagatcgcgacactgcactccagcctgggcgatagagcaagaaagactccctctcaaaaaaaaaaaaaaagagttgtccccctctcgtggtgaggctcaggacagatggtgggactccagctcttagctcaccagggacacccagtcaagggccagcaagctcacaattccctctgctactagccccaaatagccaaagctccaaaaacttgatggtcccccatagtgtctccatgagaaactcaaagaaacgggtgggaggatgtttgtttattgcactgactcccattcctacattccgctgcaggaatattagtgagttgacatgtccccatcctaacatgcaataaattctggaatctgaagctctcacagctctgcatcagagaatttcagattgtggacctgggggatgttgtcgtttgagtagtttgtttgtttatttatttatttatattttatttatttttttttgagtcggagtctcgctctgtcacccaggctggagtgcagtggcatgatctcggctcattgcaagctccgcctccccggttcacgccattctcctgcctcagcctcccaagtagctggaactacaggcgcccgccaccatgcccggttaattttttgtatttttagtagagacggggtttcaccgtgttagccaggatggtctcgatctcctgacctcgtgatccgcccgccttggcctcccatagtgctgagattacaggcgtgagccaccgggcccggccctttatttttattttttttgagacagagtctggctctgtcacccaggttggagtgcagtggcatgatctcggctcactgcagcctccgcctcccaggttcaagcaattctcctgcctcagcctcctgtgtagctgggattacaggtgcgcgccaccatgcccagctaatttttgtatttttagtagagacagggtttttgtatttttagtagagacagggtttcaccatgttggtcaggctggtctcgaactcctgacctggtgatctgcctgcctcagcttcccaaagtgctgggattacaggcatgagccactgcgcccagccctagtttttaattttttttggaaacttttttttttgagacaaggtcttgttctgtcacccaggctggagtgcagtggtgtgatcatggctcactgcagcctcaacctcctgggctcaaatgatcctcctacctcagcttcatgagtagctgtaactaccagtgtgcaccactacgtctgactaaatatatatatatatatatatatatttttttttttttgtagagatggggtctcactatgttgcccagggtggtcttgaactccttggcccaagccgcccccctcccttagcttcccaaagcactggatttataggcatgagccgctacaccatgcccaagcatatacactgttttctgaaccatttttgactaagttgcagacctggtacctttttttatttttttatttttgagatagagtctcactctgtcacccaggctggagtgtagtggcacgatctcagctcactgcaacctctgcctcgagttcaagcaattcttctgcctcagcctcccgaatagctgggattacaggcgcccaccagcatgccccgctaatttttgtatatttagtagagacagagtttcaccgtgttggccaggctggtctcgaactcctgacctcaagtgatctggccacctcagcctcccaaagtgcggagattataggcgtgagccactgtgcccagccgagaaaagcctgtttcttgactttgagccaaatagacatgacccctggagaaactgaggactggagagtcgaggcggccacccccgacctgcccccatggctctccagtgtgcaggtggcacctgctaggtggagttggaggcgttggagacagccctttggggagatgggaggtgacacccccgccccttctccgtgctccggccttctcctctgctcccatttcctctttctgggccccaaccaagccactccttccctttttgctgccgcttgctcgatcaagtcctgcctgcaccgacccctacccccgccctctgcacgccaaccctggaggcagaagcagtcccatcccctctcccatcgctggttggggcccatgctggtgcccccaggagccagacgagatgctgggcaagcctccagcccccacctcccacctggtggatcatacccattttacagatgagaaaattgagacacagagagggggaagggcagccttgggatgtcagagcttagcggggggctgagctggtgtctttgaacctctagtcccaggctcttgaagactccagcatcagtatcccggacccagggccggtttggcaggtgcgcgaactgggctgtcccagagggttccaggctcagaagagcctgaagtttcagcttgcacccagccccagaaaatctgtggctggccctgcaaggaccctgccagattttgtaccatctgtcagcaaggtcaggtcgattctgtctccccagtgtctctcaaatatgtcctctcctctccagctccatgacagccacattggtccagccccacggttgctcacctgaaccaacgcagtccccactgccctggtccgggctcccccagaccaccccccacagcctgtcctccctgcagcagccaccagagggcgcctgtgagcacctgagtcagggccagtccctcctctgcccacagccctccatggctcccaagtccctcagggtcaaagcccaagacttccctgcaacccacaaggcccagcacaacccaccctcccctccttcctctctccccctcctcactctgctccagccacaagggcctcctcactgttcctccaatatgccaggtgcggccctgccccagggcctttgcacaagctgttactgtcacctggtgtgccctctaagattttgacagccaccttccggccttcacaaatcactttcactgagaggccttccttgactgctcacaaatcacttccactgagaggccttccttgactgcgtggctatcgtagtcacctaattactccttgccctatttatcctatgttatttctttcgtaaaagtttctctacctgaaattattgtagcaaataataatacatattagtattgttatgataaataataaaaataggccaggcacggtggctcacgcctgtaatcccagcactttgggaggccgaggcagacggatcacttgagcccaggaatttgagaccagcctggctaacatggtgaaaccacagctgtactaaaaatacaaaaattaactaggcgtggtggcacgcgcctgttaccccagctacttgggaggctgagggaggagaatcacttgaacctgggagccagaggttgcagtgagctgagattgcgccattgcactccagcctgggcaacagagaatctgtctaaaaaaaaagaaaaaaagaaaaaagaaaaaaacccataagaaccataaccataaaaagtattaaaaacacaaaaactggccaggcgcggtggctcacgcttgtaatcccagcactttgggaggccgaggcgggtggatcacgaggtcaagaccacggtgaaaccccgtctctactaaaaatacaaaaaaattagccgggcgtggtggcgggtgcctgtagtcccagctactcagagaggctgaggcaggagaatggtgtgaacccgggagacggagcttgcagtgagccgaggtcgcgccactgcactccagcctgggtgacagagcaagactccatctcaaaaaaaaaaaaaaaaagaagagaaaaagaaaacaaaaacaaacaaaaactttctggccacacaaagataactggatctggccctcaagcagccggagtttgcgacccttaccgtgagcattttataatcaattcatttggccctcagtttgatgcagcaggcatggtctgttgaggtccatgttttgttttttttgtttgtttgttttgtttttttttgagacagaatctcgccctgtcgctcaggctggagtacaatggtgtgatctcagctcactgcaatctctgcctcccaggttcaagcgattctcctgcctcagcctcctgcgtagctgggattacaggcgtgagccaccacacccggctaattttgtatttttaatagagatggggtttcgccatgtttaccaggttggtctctaactcctgacctcaggtgatccgcctgcctcagcctcccaaagtgctgggactacaggcatgagccaccgtgcccagcctgaggttcatgttttacagatggggaaaccaaggcacagagcggcaaagccgctagcctagggtcactgagtgaggtcccggctgcaccggggtttgaacccaggaggcctggcgtggagttgggggtgtctgacgtggggttgggggtgtcgggggtgggagtcccgtggagggctgagcggttctgctgctccatccccaggcccaggcgagagcgggaagagcaccttcatcaagcagatgcggatcatccacggcgccggctactcggaggaggagcgcaagggcttccggcccctggtctaccagaacatcttcgtgtccatgcgggccatgatcgaggccatggagcggctgcagattccattcagcaggcccgagagcaaggtgagccgccagggcaggcaggggcccagggcaggcaggggcccagggcagggttccccagaccccggagcagggccaagttccccagacttcagggcagggcagggcagggcagggcaggcagggaagggtccccagaccctggggcaaggccatgtcctccagacatatgtgcatacatacaagtgcacacacaagtatacacgcataaatgcacacacgcacatgtatgcacacgcacagacatgcacacaaggacacacacgtacatgctcacaaagatacacacgcatgcccacatgcacacacccacacacatacacaaatgaatgcacacacgtgcacacgtgtgcacacacacaaatgcacacaaggatccatgcagatgcccccacacagatgcacacaaataagtgcacacacaaatgtacacactcaaacacgcccatgcacgtgtacacactcacaaacacacacaagaatgcatgcaaattcccacatgcacacacacacatgcacatacacaaacacacacaagcatgcatgcaaattcccacatgcacacacacacatgcacatacacaaacacacaaggatacacacatgcctgcatgcaatccccccatgcacatgcacgcacatgtgtgcacacatacaaatgcacacacaagcacacctatgcacgcacccacaaatgcagccaaggatacatgcgcgtgccccacacacaaatatgcaaacaaatcacacacccagacacacccatgtacatgtgtacatctatacacacacacacacgagcacgcttgtacatgaacaaacacagagaaatgcacacacaacactcagagtccatcacaaaggtctgagcaacgcgagtgcctggggggagctagggctgtttggggaaaagaaggggaaacccagagtctggggggcagctcagggttcacgcgcctctgggggacttctgaggggcagattgcttcagtgctctgtgtcttagtcgcttcatctgtggaaggggggactgtgagtgccgtgcttcctgggagccagctagtgtaaagagcggggctgggtgccatgctccccctgagcctgggctcgcccgagcacatgtgccctctgcagcccctcatgtggtggtctgtgcttttccctctggggatccatgcaagaacagacggaggacaaatcagaagtgtgcgggggggtcgggagctctggggaagaaggagagcagtgggaagagagcgtgtttcagggagggacgtgggggcttgcagagatgcctgcggagggcagccccactcagaaaggctaccctaactgcccccgtcctccctccccagcaccacgctagcctggtcatgagccaggacccctataaagtgaccacgtttgagaagcgctacgctgcggccatgcagtggctgtggagggatgccggcatccgggcctgctatgagcgtcggcgggaattccacctgctcgattcagccgtgtagtgagtctggggtctgcgggggatgggcgcgtggggaggggctgagggcaggggccaggctggctggcttcctgcagcaggagatattgtgggcgcagatgggctgtgaggtggtcctgctccaggatgaggtccttccagggggaccctaattcccgggggaccctgttctgggggtgacccttttcctgggggaactcccttcatggaatgaccttgttcctgggtggaccctgttccttgggactctgttctggcggtgatcttgttcttggaatgaccctattcatagggggactctgttctaggagtgactctgttcctgagggaatccagttccttggggagaccctgttctagggggtatcctgttcctagagtgaccctgtgcctggggttccctgttcctgcgaggaccctgtttcaggggtgaccctgttcctgggggaaccgtattcctagagtgaccctgttcttggggggaaccctgatcctggggggaaccctattcctggagaaccctgttcctggagtgaccctgggccttggagtccctgttcccgtgaggaccctgtttcaggggtgaccctgtttctggggggaccctgttcccgggggtgactctgttcccagggagaccctatttcctgggggatcctgttctggcgttgatccttttcctggagtgaccctgttcctaggggtgatcctgttcctggggggactgtattcctagagtgaccctgttcttggagggaccctgttcctggggggaccttgttcctgggggaaccctattcctagagaaccctgttcccggagtgaccctattcctggcgggaacctgttcctagagtgcccctgttttagaagggacccttttctgggagtgaccctgtttctgaggggaccctattctggggggaccctgttcctggagtgaccctgttcctggggggaccctgttcctaaagtgaccctgttttaggggggactctgttccaggggagaccctgttctgggggtgaccctattcctagtgggatcctgtactaggtgtgatggtggatgtccaaggtggcttgatgtctgggaagactgttcccaggctaccagcattcttggggtagcgccacccctgccatagcagctctcccgggggacaccactcctcgatgaggccattcctcatgtcacgccatccctcgggtcaccctgctctgcgtgtgaagctgcttttccttggggctccattgcctcaggtgggggacgctcctgggccatctgccaactccagggaccccacctccacccagggagctctcctcccccagcagggtccttgctgggcctttcgtagggcctgggaagcaaagggaggctggctgcaaggctgggcctcaggactccttgctctgcagctacctgtcccacctggagcgcatcaccgaggagggctacgtccccacagctcaggacgtgctccgcagccgcatgcccaccactggcatcaacgagtactgcttctccgtgcagaaaaccaacctgcggtgagcgctccacctaggcccagcctagggggcagggaaggcttcctgtaggaagggcaaaggagctggggccctgagggatgagtaggagtttcttaggcccagccttcaaggagctgccaagctaggggaagcaaagctccatgtagacacctccaggcccccaggtagtcaggactgggacctgtaggagcccaggctgaggcatcagagatccaggagggaatatcttcttggaggagggaatattaatggggttttgaaagacgaataggagttcagtagtcctaaccctgaaggggctgctggggaggaggaaatagagactatacagtcaggaccaggtctggggaggcctggtctggggagctcagaggtgatccctgtagtcatcaacactgggggatggactagagtgtgaggctggaagtcaggaaactcagaaaaaggaggagccaggacagcgggcgtggggatggaaaggaagggatgggcaagagttgtttctgatgtggaatgggcaggactggatgagtgtgggaattagaacaggaagtcaaaaatgacacctgagttttttgtcaaggtgatgggggtagacagtggagccggtgggctagaggatgaaaaggtggtgatggagtcctttgggacaggttgagtctgaggggcctagggggactccaccttagctggcagacagaggtgggaatggccagtgcagcaccctaaccctaaccctaacccagcagagcaatggccaatgtcaaaggtcaggaaaggaaaggtcaagaatacagtgagaagaatgactctgggattggcagttagagggtcactggtgaccttagcaagatctgtttccatgggctgatggcggggagctgagcaggggtgcaaagtcatgcccagagacagcgattgtgtttgacctacccctatttggccttcctttccctaaatcccccaaacctattgttttggcctcttcaatagtccttactaggaaggttcataatttatctgttttctgtgggtctcctctacaagatggagagcctcacaaggttaggggctgagtttgattcttctgcttctttagtgaatagctaaaggtcagagtagaagttggtaaatgtgggtggatggttggaaagatggaatgggggcaacccgctcgggtccccttccacgctgtggaagctttgttctttcgctcttcacaataaatcttgctgctgctcactctttgggtccacaccacctttaagagctgtaacacttactgcgaaggtctgcggcttcattcttgaagtcagcgagaccgagaacccacgagaaggaaccagctctgggacacaatagtagtgttagtacccaaggatgacttctatgggagagatacttggtctgggaatctttaaaaaaaaaaaaaaaggaaagatggaagggaatggatgggtggatgaatgggtggatggatagatgaatagatggatggataagttgagggatagatgagtggatggatggagtggcaggatggatgagtggatgaatcaatggatagatggatgagtgggtggatggatgaatggatggatagatggatggattgaaagagggatgagtggatggatggatggatggatggttagatgggtggatgggtgatacatgaatggatgagtgggtggatgagtggatagatggatagatgggtggatgaatgggtggatggatgggtgaatgagtggatggatgaattaatgggtagatgggtggaagggtgatgggtgaatggatgggtgggtggattggtgagtgaaggatggatggatgagtggatagatggatgggtgggtgggatggatgaatggatggatgaatgggtgggtgaatgcatggatggatgggtggatgagtggatggatggatgaatgaatgggtagatgggtggcaggtgatggatgaatgaatgaataaatgggtgaatgggtgagtgaaggatggatggatgagtgggtgaatggatggatgaatggatgagtggatgggggtgtgggtgggtggatgggtagatgggtggacgagtgagtggatagatgggtagatggatgtatgagtagatggataatgggtgaacagatgggtggatggatagatgagtagatgaagcgatggatggatgggtggattgagtaaatgggtggacaggcaggtggatgatggatggatgaatagatgggtagatggatagacggatagatggatggatgagtgaatgaatagatggatgggtggatggatagatggatggatgggtgggatggatggatggatggatggatgaatgggtggatggatgggtggatgagtggatggatggatgaatgaatgggtagatgggtggtgggtgatggatggatggatgaatgggtggatggatgggtggatgagtggatggatggatgaatgaatgggtagatgggtggtgggtgacggatgaatggatgaatgggtggatgggtgagtggatgaatggatgagtggatgggtgggagggtgggtggatgggtacatgggtggatgagtgagtggatagatgggtagatggatggatgggtagctgggtaatgggtggacagatgggtggatggatggatggatgagtaaatggagagatggatgggtgggtcggtgggtggatttcgtaaatgggtggacaggtggatggatgatggatggatggatagatgggtagatggatagatggatggatgagtgaatggctggatgggtggatggatgggtgggtggatggatgatggatggatggatagatgggtagatggatagatggatggatgagtgaatggctggatgggtggatggatgagtgggtgggtggatgggtggatggatgagtgaataaatcgatgaatggggtgggtgggtggataaaagtttaggagtgaaggtagaggctgggaaatcatggggaagtctgggccaaggaagtgatttttaggtgtggcccaggagtgagacgaatgaatggagtgagggctcagaggacactgagacccgagatgagaggtgatgcccacagttcccaactggtcagttgctgatcccactcccgtctcagtctccagagccccctctcgacggctgcttaccctgtctggctctggatgtggggtttgagggactctgaggatgcatgggaggagtgggtctcagggatcaggagacacatccagcagctgcagcctaactgcttcatcatcagtcccggtttcccctcctgtgcaatggggcaagtcccttcttgcttgaggccctgggccgggcccgtccaaagcctctgttctgggacttcctgagtaacggttgcatccccagggaaatgacgcacagatggttatcagcgacccacatttctcagaagagagagaacaggaaggtgggggcagggttcaggcttttgttacggtgcgtggggctgagtcacagatggaggggaggacgtgtgctctgggaacagccctcattcccatctgtgtggccactggacatgcccatggccagccagagcacaggagccccatagcacagatgggaaaactgagttttggagatgtttggcaatttcctccgccgggtcgcccagccagcaccagggcacatctcagatctgtccaacctgctcccctctaatatgggggtagaaagcaggcagcccagcacagtagaagcttgggaaagtccccgctcctccctggatctcaggcttctcatctgtaaaatgggcgtaagactcatccttgcctcgcgggaatgacatggcaaatccacgagaggctagcacctattcttgctgtcgctattatggatcttggcatatcccagacgtgatgggggttgggggtgtcacggagcaggctcctgagctctgaaagggggcacctcggttccctgtaggatcgtggacgtcgggggccagaagtcagagcgtaagaaatggatccattgtttcgagaacgtgatcgccctcatctacctggcctcactgagtgaatacgaccagtgcctggaggagaacaaccaggaggtgcgccaccgcctccctcgccctgcccacttgttggcccagggaccctcacctgagcaggaagctctggtgcagaaagggagggatccctgctcttgaacgggcctgtgtgtgcccagcatggctatgaacttgacccttcagccttttgtggtcagattgcagcaacccaagacacagacctacagcatttgtttggtcaggaccccagacacacacacacacacacacacacacacacacacacacactacagtgcacacacgcacatacacaatgcatgcacacaaacacgcacagacacgtgcataatacatgcacatacacacgtgcacacacgggacacatgtacacacgcagtgcacatgcacaacacatgcacacgaacacacatgcaccacacacatgcacacttgcatgcactcacgtgcacaatacacgcatatgtacacatgcgcacacacatgaacacacacatgcacacacacagtacacacatgcacacgcacacacaggcacacacacgcacacacaggcacacaggcacacacatgcgtgcacacacacatgcacgcacacgcacaggctggagtgcagtggcgcgatctcggctcactggaaactccgcctcccgggttcacaccattctcctgcctcagcctccggagtaggtgggattacaggcacccgccaccacgctcggctaattttttttttgtattcttagaagagagggggtttcaccatgttagccaggatggtctcaatctcctgacctcgtgatccgcccgcctcggcctcccaaagtgctgggattacaggcgtgagccactgtgcccagccaatagcctcttttaataagtacaccagtcgtctaggatcagggcccaccctactccagtacgacctcatctgggttaattcctcgtgtgatggccctgtttccaaagaaggtcacaaactgaggttctagggggttaggtcttgaacgtatgaattttggggaaatatgatgtaccccataacacaaggcatttgagaccttattgtacttttttttttgagatggagtctcgcttttgtcgcccaggttagagtgcagtggcgcgatctcagctcactgcaacctccgcctcccgggttcaagcgattttcctgcctcagcctcccgagtagctgggtttacaggcacctgccatcatgcccggctaattttttgtatttttagtagaaacggggtttcaccatgttagccaggctggtctccaactcctggcctcaggtgatctgcccgccttggcctcccaaagtgctaggattacagccgtgagctgccgcgcccggccaggtctccctcttcttatgaggacagcagtcacggacttgagggccaccgtattctagtattgcctcaccttaacgacctcttcaaagaccctatctccaggccaggtgcagtggttcatgcctataaccccagcacgctgggaggccaggagttcaagaatctctctccagataaggtcacactctgaagctctggggggacatgaatttcgggaggacacacttccaaccagcacaggcacaaaaccatgtcaggcacacccaggcagctgtccatatggaaacacgggcacacccgcctcagccccagccaggcagataggggtgagcccatgcccctggagccaacagccccgtctccgcgatgggagggtttcctgtcccacctggctggttgaagcactaacctgcttctgcccccaacacagaaccgcatgaaggagagcctcgcattgtttgggactatcctggaactaccctggttcaaaagcacatccgtcatcctctttctcaacaaaaccgacatcctggaggagaaaatccccacctcccacctggctacctatttccccagtttccagggtaagtaattctagaactttctatacccttcaactcccaaaagcagctccgaagagagatgctaatccagactctacttcagcctggagtcaccggaactttcacataggatcagacccgcgttctagactcagctccatccactgcccgacctcattgaatctgttttcccttctgtggaatggaataaaatagcagaggcccttggaactgagtaaagtgaggaattctaaaaacacgtagcatatcacgtacaccttaaacattttatttatttatttatttttgagacagagtcttgctctgtcaccaggctggagtgcagtggcgtgatctcggctcactgcaacctttccctccagagttcaagcgattctcctacctcagcctccctagtagctggaactacaggtgcgcgccaccacgcccagctaatttttgtgtttttagtacgaaaagacgggatttcaccatgttgaccaggatagtctcgatcacttgacctcctgatccacccgcctcagcctcccaaagtgctaggattatagacaggagccaccatgcccggccaaacattttattttatgcttgttggccaacatttggggtttgagccaagatccttcaagcatgggtttgctatgtagaggtcactgttgtaaagcacttctggaaagattgtctactatttccagaatctgcctaggttttaagaatgattctttttcttttctttctttcttctattttttctttttgagacagagtctcactctgtcacccaggctggagtacagtggtgcgatcttggctcatggcaacctccaactccccggttcaagtgattctcctgccttagcctcccaagtagctgtgattacaggcacgtgccaccaagcctggctaatttttagtagtttcctgtcctatttttagtagagatggggtttcaccatgttggtcaggctggtctcgaactgacctcaagtgatccacctacctcagcctcccaaagtgctgggattacgggcgtgagccaccgcatctggccataacgtttctttttctaatctttcatagtgatctcatctatccctaattggatagcaatttctttttctttaatccattttttctttaatttttttttgtttgttttttgagacggagtctcgctctgctgcccaggctggagtgcagtggcgcaatctcagctcactgcaagctctgcctcctgggttcacaccattctgctgcctcagcctcccgagtagctgggattacaggtgcccgccagaacgtctggctagttttttgtatttttggtcgagatggggtttcatcatgttacccaggttggtctcaatctcctgacctcatgatccacctgtctcggcctcccaaagtgctgggattacaggcgtgagccatcgtgcccagtctattttttctttaatttcttttctttttttttttttttttgagatggagttttgctctttttgcccaggctggagtgcaatggcacaatctcggctcaccgcaacctccgcctcccgggttcaagggattctcctgcctcagcctcccgagtagctgggattgcaggcatgagccaccaccccggctaattttgtgtttttagtagagacggggtttctccatgttggtcaggctggacttgaactcccgacctcaggtgatccacccgcctcggcctcaaagtgctgggattacaggcgtgagccaccacacctggcctttctctttaatttttaaagcagagctttgaacaatgtttccaaagcacacagcttagttttgtaatacaatgaccttctttcatgcggcacttgtagctacagatttgcataacgtttcttttaattacatatgaatcaagacacgtacaatgggcaaaaacaggtttgggaacaaactctcagtccatccagagggtgaaagggccacagggcaactacagagaaacaccatctagtgttgggcaccacttagtatattttacaaaggggaggcagagttgtggttaatccagggaccaacgtggggaaggtacatattcactagcactttccccagaacaccactgtgaggataaagtgtggtggcgggtgtcctgcttagctactgccgagtaacaaaccatccccaaacttagtgacttaaactggtcattttcctttgcttatgattttgtgggtcaggaatttgggaaaggttgagctgggtaagttcatctctgatccatgtgacatcagctgggctctatgggattggagataaacttccaagatggcttcttcccccatatgtctggtgccttggtgctcttggcactcttggcctctctctctgtgtctctccctgcctccctctcccatctcatctctctctcctcccctttctcctagtctgtctctccttttccacctcccctgttctctctgtctccatctggggcctcatgatccacagcctcttcacatggtttgagcttactcacaatatggctgcctcagggtagacagacttcagcccaggtggaagctgcttctcatgatagcctcagaaatgtcagacgttactctgccacattctatttgtcaagcacatcactcatatcagcccggattcaaaagaaagagactccatctcttgaaggcagcatgacacatgcatacagggagggaaggaagtgacggcagccatcttggagataacttgccttcatgtcctggggatgccgtaacaaagtaccacaaactgggtggcttaaaacaacaggaaacaacagaagtccaaagttaaggtattggcaaggttggttccttttggaggctctaagggaaaatccattccatgcttctctctcagcttctggtggtggcctacaatccttagcttgtagacatatcactgcaatctctgcctccatgttcacatggctgtcttctcaccatgcctttatgtgtcctctcctgttgttataaggccaccagtcattggatttagggcccatactttggtatgaccactttttttttttttttttttttttgagacaaggtcttgctctgttgcccaggctagagtccagtggtgtgatcacagttcactgcagcctcaacctcctgggcacaggtgatcctcccacctcagcctcttgagttgctgggactacaggcgcacaccaccacacctgggtaatttttgtatatttctgtagagacagggtttcgccatgttgcccaggctgatctggaactcctgggcccaaccacacatctgtcatccacctgccttggccttccaaagtgctaggattacaggcgtgagccctcatgcctggccatgacctaatttaacttaactaattacatctgcaaatatccgatttctaaaagtcatattctgaagttccaggtggacatgaattttgggggacactgttcacctcaatatacaagcaaccatagtagatgagtccttagtacatgcttgacaccaggtccacaatcagtaaacataaactttggtgaagtcaccaggttttgatccctggtcttgtcatgtctcagagcccatgaggccaattttagccaattatacccacaagattcagggtctgggagatagacgtcaagttgttccaggatggtggcctggatagcccctcttccttgccaagcagccctgggaatcagctcatagtttagagaatttgggaacaggataaggtagatatttttttcattcaggtcaaagggaaccacccatgactcatccttgtctcccagcacaagtgactggtgcactctttgctgactcccagccctaccctccactgtgctaaataatatttgtgataataataagaaaccacactttgggaggctgaggcgcgcagatcgctttaggtcaggagtttgagaccagcctggccaacatggcaaagccccatctctgttaaaaatacaaaaattagctgggtgtggtggcgggggcctgtcatcccagttactcgggaggctgaggcaggagaatcgcttgaacccaggaggtggaggttgcagtgagctgagatcatgccacttcactccaacctgggtgacagagtgagactctgtctcaaaataataataataataataatgataataataataaaattgataacagcagctaacacatctaccgcactggtggaagcactctacaaagcttctttaatcttcatgttaaaaccctatgcagggctgggcacagtggctcacgcctgtaatcccagcgctttgggggggtcaaggcgggctgatcatttgaggtcaggagttcgagaccagcctggccaacatggcaaaaccccatctctactaaaaatacaaaaattacctgggcatggtggcaggcgcctgtaatcccagctactgccaagattgcaccattgcactccagcctgggcgacagagcgaggccccatctcaagaaaaaaaaaaagaggactctcttcccctcgtttggccttgatgccgccatcttcacagtcctgggatatttgtctatgcgattccagtcttccaactgcactggctgtaagcgaggccaagagagtgtctctctttaacacagttctgcccgaagtcccagagctgggtctcattggtccatttcaggtcacatgactcgtgtgagacaatctcctgtgttcccattggctgggccggagtcgtgtgaccagctatgactacaaaagatggagtcaacgcacagaaaaatgacaggcgcgatccctgggtcccttcagtgctggttacagggaagagggtctccagaggccccctgggtccaaagagggagggtcctcacccccttcccacactgtttccccaggccctaagcaggatgctgaggcagccaagaggttcatcctggacatgtacacgaggatgtacaccgggtgcgtggacggccccgagggcagcaagaagggcgcacgatcccgacgcctcttcagccactacacatgtgccacagacacacagaacatccgcaaggtcttcaaggacgtgcgggactcggtgctcgcccgctacctggacgagatcaacctgctgtgacccaggccccacctggggcaggcggcaccggcgggcgggtgggaggtgggagtggctgcagggacccctagtgtccctggtctatctctccagcctcggcccacacgcaagggagtcgggggacggacggcccgctgctggccgctctcttctctgcctctcaccaggacagccgccccccagggtactcctgcccttgcttgactcagtttccctcctttgaaagggaaggagcaaaacggccatttgggatgccagggtggatgaaaaggtgaagaaatcaggggattgaggacttgggtgggtgggcatctctcaggagccccatctccgggcgtgtcacctcctgggcagggttctgggaccctctgtgggtgacgcacaccctgggatggggctagtagagccttcaggcgccttcgggcgtggactctggcgcactctagtggacaggagaaggaacgccttccaggaacctgtggactaggggtgcagggacttccctttgcaaggggtaacagaccgctggaaaacactgtcactttcagagctcggtggctcacagcgtgtcctgccccggtttgcggacgagagaaatcgcggcccacaagcatccccccatcccttgcaggctgggggctgggcatgctgcatcttaaccttttgtatttattccctcaccttctgcagggctccgtgcgggctgaaattaaagatttcttagaggctgcgtcgccagcgtcctgtttatcccctctgcattcctttctcggcttacgtgtcccgggggcagtgcttacagtgcggggagcaacgtggagtaggaaggaaaaaagttatacttcttgtctacccacctgtcctggccatggtacccagaactgtggaggctgtgagtcccgcaagccgggacgtggagtccaacctccctcccaggctgggggggacattgaagcagactcctccgtggctactgacctgaaattccagtagcagcccccacccagctttgagaaggcctcttactatcctcagggcagtgttctggggtgcaagccgtagcaccccactttacaggtgaggaaaccggggcgcagagaagtggagtaatttgactaagctcacacacctggaattgacagaggcaggagcctgttcctacgttgaacacatttgtggttttttatttgtttgttttttgagacaatctcacttggttgcccaggctggagtgcagtggtgcgatctcggttcactgcagcctctgcctcctgggttcaagtgattctcatgcctcagcctctgcagtagctgagattacaggcacccgccaccacacctggctactttttttttttttgatggagtcccgctctgtggcccaggctggagtgcagtggcgcaatctcgtctcactgcaacctccacctcccaggttcaagtgattctcctgcctcagcctcctgagtagcttggactacagttgtgtgccatcacacctggccatatttttgtatttttagtagagacagggtttcaccatgttggccaaactggtctcaaactcctgacctcaagtgatccgcctccctcgacctcccaaagtgctgggattacaggcatgagccaccacacctggcctaatttttcttcttataaaaacactagtcacactggatcagggtccagcctgtcatccccatcttaacttgattacatcggcaaagaccgtatttctaaataaggtcccattcacagataccgggggttatgacttcatcatatctttgtaggggagccacatttgaacctataaaaggtattttgtaatacaaaaaggagccgggcgtggtggtgcatgcttgcaatcccagctaattgggaggctgaagcatgagagttgcttgaacccgggaggcggaggttgcggtgagccaagatcctgccactgcactctagcctgagcgacagagtgagaccttgtctcaaataataaataaataaatacataaataaataaataaatataaaagtatgttatagaaaccctctccactgagtttggtctgacattttgctgctggtcagactggggtgatgggtttcagggaggaagacctcagtggtgacagcccttctcaccacatcctatctttctgttttttttttgagacggagtctcactctgtcacccaggctggaagtgcagtggtgtgatctcggctcactgcaagctccgcctcccaggttcacaccattctcctgcctcagcctcccgagtagctgggattacaggcgcccgccaccacgcctggctaattttttgtatttttagtagagacgggctttcaccgtgttagccaggatggtctcaatctcctgaccttgtgatccgcccgcctcggcctcccgaagtgctgggattacaggtgtgagccaccgcgctctgcctcttgttgttgttttgtaagaattttagactcacagaaaagttgcagaagttgtacacagttcccaaatgccctccacccagcttcctcttacctcttacgtaaccctagtacaacccaggaaattcacatcagcgagcgtcctatgaacgaacctgtgtgtagaccttactagaatgtggcgggttctcgctcccgtcctcctttcctggaccaggatccaatcccggatcccacatcgccatgagctgcctccctctcctcattctggggcagtgcctcagtttcctttgtgacacgtcggaggagttttgcttggttgtttcttgagccgttcctcaggttgggttggtgtgaggtttgctggtgacagaaagggatgtcagagccactcagggcatcacctgactgggttcatcatgacaaagtggctcatccctggcgatcatacgttgcggatgtcttttcaccattggttggtcggagtcaggacccaaacaaagcccgtgcgtggcgcttgggtgctgtgtctcttaagtctctttcctctttttttttttttgagacggagtcttgctctgtcacccaggctggagtgcagtgatgcgatctcggctcactacaagctctgcctcccgggttcatgccattctcctgcctcagcctcctgagtagctgggactacaagtacccgccaccacgcccgggtaattttttgtattttttagtagagacggggtttcactgtattagccaggatggtcgcgatctcctgaactcgtgatccaaccgccttggcctcccagagtgctggaattacaggcgtcagccaccgcgcccagcctcctcttttttttttttttttttgagacagagttttactcttgtcacccaggctggagtgcagtggtgtgatctcagctcactgcaacctgcacctcctgggttcaagcgattctcttgcctcagcctcctgagtagctgagattacaggcatgcgctaccacacctaggtaatttttatatttttagtagagacggagttttgccatgttggccaggctggtatcgaactcctgacctcaggtgatcctcccgcctcgacctcccaaagtgctgggattacaggcgtgagccactgtgcccagccatgacccagtgggtcttaagagttttttgactgggcacagcgagatgcttttaactcatcctttactttgtcagcttcagatctgcactggatcgtttctccaaggagccctctttcctttgaatgggagatgatatttagagaccacaatctgagcaccaagtgaggaaacacatcttgtctttttttttattattatactttaagttctagggtacatgtgcacaactgtgctggtttattacataggtatacatgtgctgtgttggtttactgcacccattaactcgtcatttacattaggtatttctcctaatgctatccctcccccctcccctcaccccacgacaggccccggtgtgtgatgttccccaccctgtgtccacgtgttctcattgttcagttcccacctatgagtgagaacatgcggtgtttggtttgctgtccttgtgatggtttgctcagaatgatggtttccagcttcatccatgtcactacaaaggacatgaactcatccttttttatggctgcatagtattctgtggtgtatatgtgccatattttctttttctttttttttgagacggagtctcactctgtcacccaggctggagtgcagtggtgcaatctgggctcactgcaagctccgcctcccggattcatgccattctcctgcctcagcctcctgagtagctgggattacaggcgcccaccagcaagcccggctaattttttgtatttttagtagagacggggtttcaccgtgtcagccaggatggtctcgatctcctgaccttgtgatctgcccgcctcagcctcccaaagtgctgggattacaggcgtgagccatcacgcccggcctgtgccacattttcttaatccagtctatcattgatggacatttgggttggttccaagtctttgcggaaacacatcttttgttcgcttatttttagtgcaaaaatatttgaaacctacagaagttacaaaaccattacaatgtattcccctgtatttttcatccaggtcaggagccggcaaactgctacccacaggccaaatactacttcaattgcttttgtaaagttttattgaaacacggtcatgtccattcatgtacctgtgtctacgcaggctgttcctgcatccatggaattgagtaactgccactgatactgtctggccccaaaagccaaaaatatttactatttggcctttttgttttgttttgtttgttttttactccccttaaagacaaggtcttgctccgtcacccaggctggtgtgcagtggtgcaacctcagctcactgctgcctccaactcctgggctgaagggttcctcctgcctcagcctccccggggattccaggcataagcccctgtgtccggccaggtgtgagttttcgagtggacatgcttgcattcctcttgagtgtgaccctagcgacagaattgctgggtcatgtgctgaggtcatccatccatttctaacccagggttggccggcagcagcccctccgagctggctcctgtgttctttgccaggtcctcctccctctgtgatcacgccctccctctctggcacactgagatgttccaggctcatctcctgccctactcttggaatcaacccttcctcccaggttccctggatcctttcagcaaggggctgtagggggagggaggtgatctttagaagccacgatctgggcactaggtgctccttgctctgggattgtctcagtggaaagttaggacagggtttttttatgttttttgcataaatcatgagatcctgaattcacactgatatttgcaatcctttctttttttttttttttgagacagagtcttgctctgtcactgaggctagagtgcagcagcacgatctcgactcactgcaacctccacctcctcggttcaagcgattctcctgcctcagcctcccaagtagctgggattacaggtagtcaccaccgtgcctggctaatttttgtatttatttatttatttattattttttttttctgagacagagtctcgctctgtcacccaggctggagtgcagtgccacaatctcggctcactgcaacctccacctcccgggttcaagcaattctcctgcctcagcctcctgagtatctgggattacagcagtgcaccaccacgcccagctaattttttgtatttttagtagagacggagtttcactgtagtggccaggatggtcttgatctccggacctcgtgatctgcccacctcggcctcccaaagtgctgggattacaggcatgagccaccgtccccggtctaatttttgtatttttagtagagaaagggtttcaccatcctggccaggctagtcttgaaatcctgacctcgtgatccacccgccttggcctcccaaagtgctggggttacaggcgtcagccaccgtgcccggtccaatttttgtatttttagtagagacagggtttcaccatcttggccaggctagtctcgaaatcctgacctcatgatccacccgccttggcctcccaaagtgctggggttacaggcatgagccaccatgccaggcctttttttttttttttttaagagacgggatctctctccatcacccaggctggagtgcagaggagcaatgatggcttaccacggcctcaacctttcaggctcaagcaatcctcccatgtcagcctcctaagtagctaggaccacaggtgcatgccatcacacccatgttatttcatttttattttttgtagaaatggggtcttgccgtgttgcacaggctgggaaacttgaagtcctatttaaccctgcaagggttctttcttgctttctcccaggtcatatttacatctttctctcccagcaaagaccctagttcctaataatatctttgtatttgctactttgctcagtcctgtaaaacacatgatagtttcaaaattgctccacccatacgttccccaatgacaaatccgctaaataaaggtcaaagtttctttgcaattatttttgtctctcttcttcttcttttttttttttttttttttttttttgagacagagcctcactctgtcacccagactggagtgcaatggcacaatctcggcttacggcaacctccgcgtcccagggtcaagcaattctctgcctcagcctcctaagtagctgggattacaggcacccaccaccacgcctggctaacttttttctttttttttttttttgagacagagtctcccactgtcacccagactggagtacagtggcgcaatctcggctcactgcaacctctgcctcccgggttcaagcgattctcctgcctcagcctcccgagtagctgggattacagatgcccgccaccacgcccggctaatttttgtatttttagtagagatggggtttcgccatgttggccaggctggtgctgaactcctgacctcgtgatccacccgccttggcctcccacagtgctgggatcacaggcgtgagccaccgtgcccagcctctttttgtctttagagtgagtactgtgtatacaagttccgcgggctgattcttttctatctctatgtggttacgtttttcatttgaaatacagtttggttcatttgttttctactgttattccatcttaaagcttttccctccatccttgttgatcaattttatctttcaatatagaaagcacgaatagggcttaaaactacacaaaaggccaggcatggtggctcacgtctgtaatcccagcactttgggaggctgtagcgggcagattgcttgagcccagcggttcaagactagcctgggcaatatagcaagacctcatctatacaacaaaacaaaacaaaacaaaacaaaacgcctgtaatcccagtactttgggaggccaaggcaggtggattgcctgaggtcaggagttcaagaccagcctgactaacatggtgaaaccccatctctaccaaaaatgcaaaaaaaaaaaaagctgcatgtggtgccaggtgcctgtaatcccagctactcaggaggctgaggcaggggagtcgcttgaactcaggaggcagaggttgcagtgagctgagtttgtgctactgcactccagcctgggcgacagagcaagactccgtctcaaaaaaaaaaaaaaaaattagctgggcgaggtggagtgcacctgtagtcccagctactagagaggctgaggtgggaggatcgcttgaacccaggaggcggaggttgcagtgagctgagatcgtgccactgcactccagcctgggcaacagagcgagactccatctctaaataaataaataaataaataaataaaataaaaattgtaaaatcccaacatgtcccggcaagcgctgcgttccattcatggagctcgttcttgttcttttgcacagctgcagagccctcctttctggactgtggcatagttcattcattcacctctgtcctgtgtgtgcacattcgggttgaaaccagcgttgtgcattcacaaacagcagtttaggcgatgaccttttgcacatatactcggtctcgttagagccctgtcttcagggtgaatttctagaagaggggcctgcccttctgcagtgtggggataatggttagattaagttttgttttgttttgaaatggagtttcactcttgtctcccaggctggagtgctgtggctcgatcagctcactgcaacctctgcctcctgggttccagcgattctcctgcctcagcctttcgaatagcacccgccaccacacccggctaacttttgtatttttagtagagacagggtttcctcatgttggccaggatgttctccagctcctgacctcaaattacctgcccgtctcagcctcccaaagtgctgggattacaggtgtgaaccactgtgcccggtccagtccaggagcaagttctaaccaggatcaagggtcaaggtctgggtttgtccattatcataggctaagtcagggtcagggttcagccagggatcagggctcagttcaggattggggctcagccagggtcagggctcatcttggagtcagagctgagcctggggtcaggcatcagtctaggttggaggttgggattgggacctgggggtcttggtccaggattggaggctgtgtctgggattagggttcagtctaggatgtggaccaagcctgggatcagcattcagtccagggtagggggctgagcctgggattagggcttagtcttggatgtggactgagcctgggatgagagctcagtccagggattagggctcagtctaggatggggactgggcttgggatgcaggctcagtacagagtggggggctggtcctgggatcaaggctcagtctaggacgggggctgggcctgggactcagcaatcaggactcagtctaggatgagggactaagccttggatcagtgttcagtgcagagtggggggctgggcctaggagcagggctcagtcaagcatagggggcttagcctgggatcagggcttagtccatcatgaggcactcaacctcagaacacacaatgtctctctgtgtaggtgcctgagtcatgtgaggctggactgaggctcacttgtctactcactgggcagggcagtgcctgggcaagacctggctgtttgtttccctcctggcctcacctcccagctgccggcccctcctccccgagccccacatccctctccagatcccctttctgcttggtgacctccagtgacaaaaggcagctgcctccccagtcagttcctcgcatggagcctcccgacactgtcctgcttcagaactgaaccgtaagcaaagggaggggccatggggccccagcatgtgctgcgatcagcccccgtctcctgccagccctgccctccctggggtgcccccgcttctcagggccgatactgtgccgctcatgggacgcctgtgttctcatgggacgtctgtgccctcatgggacacctgtgcccctcatgggaggcctgtgttctcatgggacgcctgtacccctcatgggacgcctgtacccctcatgggacgtctgtgttctcatgggatgcctgtgccctcatgggatggctgtgttctcatgggacgcctgtaccctcatgggacgcctgtgcccctcatgggacgcctgtgttctcatgggatgcctgtaccctcatgggacgcctgtgcccctcatgggacacctgtgttctcatgggacacctgtgcccctcatgggatgcctgtaccctcatgggatgcctgtgccccgcatgggatgcctgcattctcatgggacacctgtgccctcatgggacacctgtgttctcatgggacacctgtgttctcatgggacacctgtgccctcatgggacgcctgtgccctcatgggacaactgtgttctcatgggacgcctgtgttctcatgggacgcctgtgccctcatgggatgcctgtgttctcatgggacgcctgtgcccctcatgggatgcctgtgccctcatgggacgcctgtgttctcatgggatgcctgtgcccctcatgggatgcctgtgttctcatgggacgcctgtgcccctcatgggatgcctgtgttctcatgggatgcctgtgcccctcatgggatgcctgtgccctcatgggacacctgtgttctcatgggacacctgtgccctcatgggacgcctgtgttctcatgggacgcctgtgccctcatgggatgcctgtgccctcatgggacgcctgtgacctcatgggatgcctgtgttctcatgggacgcctgtgttctcatgggacgcctgtgccctcatgggacgcctgtgttctcatgggacgcctgtgccctcatgggatgcctgtgccctcatgggatgcctgtgccctcatgggacgcctgtgttctcatgggacgcctgtgcccctcatgggacgcctgtgccctcatgggacgcctgtgccctcatgggacgcctgtgttctcatgggacgcctgtgcccctcatgggacgcctgtgccctcatgggacgcctgtgccctcatgggacgcctgtgttctcatgggacgcctgtgcccctcatgggacgcctgtgttctcatgggactcctgtgccctcatgggacgcctgtgttctcatgggacgcctgtgcccctcatgggacgcctgtgttctcatgggacgcctgtgccctcatgggacgcctgtgttctcatgggacgcctgtgcccctcatgggacacctgtgttctcatgggacgcctgtgccctcatgggacgcctgtgttctcatgggacgcctgtgcctctcatgggacacctgtgttctcatgggacgcctgtgccctcatgggacgcctgtgccctcatgggacacctgtgttctcatgggacgcctgcattctcatgggacgcctgtgccctcatgggacacctgtgttctcatgggacacctgtgttctcatgggatgcctgtgccctcatgggatgcctgtacccctcatgggacgcctgtgttctcatgggatgcctgtaccctcatgggacgcctgtacccctcatgggacatctgtgccctcatgggatgcctgtgcccctcatgggatgcctgtgccctcatgggacgcctgtgttctcatgggatgcctgtaccctcatgggacgcctgtgcccctcatgggatgcctgtgttctcatgggatgcccgtgccccgcatgggacgcctgaattctcatgggacacctgtgccctcatgggacacctgtgttctcatgggacgcctgtgttctcatgggacacctgtgccctcatgggacgcctgtgttctcatgggacgcctgtgccctcatgggacgcctgtgttctcatgggacgcctgtgccctcatgggacgcctgtgccctcatgggacgcctgtgttctcatgggacgcctgtgcccctcatgggacgcctgtgccctcatgggacgcctgtgttctcatgggacgcctgtgcccctcatgggacgcctgtgttctcatgggacgcctgtgccctcatgggacgcctgtgccctcatgggacgcctgtgccctcatgggacgcctgtgttctcatgggacgcctgtgccctcatgggacgcctgtgccctcatgggacgcctgtgttctcatgggacgcctgtgccctcatgggacgcctgtgccctcatgggacgcctgtgttctcatgggacgcctgtgttctcatgggacgcctgtgcccctcatgggacgcctgtgttctcatgggacgcctgtgccctcatgggacgcctgtgttctcatgggacgcctgtgcccctcatgggacgcctgtgttctcatgggacgcctgtgcccctcatgggacacctgtgccctcatgggacgcctgtgccctcatgggacgcctgtgttctcatgggacgcctgtgcccctcatgggacgcctgtgccctcatgggacgcctgtgttctcatgggacgcctgtgcccctcatgggacacctgtgttctcatgggacgcctgtgccctcatgggacgcctgtgttctcatgggacgcctgtgcccctcatgggacacctgtgttctcatgggacgcctgtgccctcatgggacgcctgtgttctcatgggacgcctgtgcccctcatgggacacctgtgttctcacgggacgcctgtgccctcatgggacgcctgtgttctcatgggacgcctgtgcccctcatgggacgcctgtgttctcatgggacgcctgtgcccctcatgggacacctgtgccctcatgggacgcctgtgccctcatgggacgcctgcgttctcatgggacgcctgcattctcatgggacgcctgtgccctcatgggacacctgtgttctcatgggacacctgtgttctcatgggatgcctgtgccctcatgggatgcctgtacccctcatgggacgcctgtgttctcatgggatgcctgtaccctcatgggacgcctgtacccctcatgggacatctgtgctctcatgggatgcctgtgcccctcatgggatgcctgtgccctcatgggacgcctgcattctcatgggacacctgtgccctcatgggatgcctgtaccctcatgggacgcctgtgcccctcatgggatgcctgtgttctcatgggatgcctgtgcccctcatgggacgcctgcattctcatgggacacctgtgccctcatgggatgcctgtacccttcatgggacgcctgtgtgtggttgccatgattactacctgagactgtcactacgacagttactattgttactacttgagaccatcattacaagactgaacgaagggacgaatgtagaaatgaaaacttaagacagaagaaactgttttaaaggaagggaccaggggaagaaaaagagagctccctgcttctagtgagcaaaggcagccccccaagcttctacagcccttcgtacttattgggtagaaagcagggggaggaaacgattggccagctgcttgattgttcacacgttcacgttattgctaacaggtttcagatttgcctacttgcaagaaacacttgtgcctggggcgtgactgccctcagcattccttctgggcggcagacgcagtttgtcagtttgccaacagcctgctttcatgagaacagtttgctgtttactcacgtagcctccagtggtatactgagttgatcacaaccctcattctttcggccttcaacacctgagccctcacgggacatctgtgcccctcatgggacacctgtgtcctcgcagtacacttgtgacccttccaggacaccttactggtagaattagtgtagctgcccccaccctgaggccaaggacaccattgtctcaggaaggctgaagaccacaggctcctggggggacagagggcaggtggggcccctcaggaccctccttggtggtaagtgggcctggcctgggggtgattgcaggcgggaggaggctcccagcagggacttatcctgggtcctactcacacttctggggcctgcattatttcccaaatcaccccacaccccaaggccttctggatggggacgagtggggggtcacagacactgggggagctggagagcagagacctcacactccatccgtgacagatgatgtccaagcccctacatgccccagaccccagggcaaggctgagcctccctcctcagaccccagggcaaggctgagcatccccactcagacctcagggtagggcctcgcctcctcccttggaccccaggacagggcctcacctctcccctcagaccccaaggcagggcctcgcctcccccctcagactcaggacagggccatgcctccccactcagaccccaaggcaaggccaaccctcacccctagaccccaggcaggttcaagcctccccgctcaaacctcagggcagggcatacctccctcctcagacccagggcagggtgtgtctcccctctcagaccacagcacagggcctcgcatccctcctcagaccccaggacaaggctgagcctctccgctcagaccccagggtaaggtcatgcctcccctctcagaacctagggcaaggccaaccctcccccctcagaccccaggcaggtccaagcttccccctcagacgccagggcagagcctgcctccctcctcagacgccagagcagggtgtgtctcccacttagacccacagccacctcacctcaggctgagtcaccgtgagccgttgtcagcagggccatggggatggggtgagcaagtccctacttttcctatgcacctcaatcccagtggggggctgccccagggggccagcagctctgctcccagcagggtgagctcaggggcaggagaggcaaccatgaatcccaaaatgggcgcctggccccgagaccctaccagcttgtccctgggggtctctctccctggacctgtgtgtcctcccatgggcagaaagttggcctcaggccgcctttgtgggcctcagttttcccttctgtaacgcatcaggctctctgggcctcagtttccccttctgcaacgcatcgggctctctgggcctcagtttccccttctgcaacgcatcgggctctctgggcctcagtttccccttctgcaacgcatcgggctctctgggcctcagtttccccttctgcaacgcctcgggctctctgggcctcagtttccccttctgcaacgcatcgggctctctgggcctcagtttccccttctgcaacgcctcgggctctctgggcctcagtttccccttctgcaacgcctcgggctctctgggcctcagtttccccttctgcaacgcatcgggctctctgggcctcagtttccccttctgcaacgcatcgggctctctgggcctcagtttccccttctgcaacgcatcgggctctctgggcctcagtttccccttctgcaacgcctcgggctctctgggcctcagtttccccttctgcaacgcctcgggctctctgggcctcagtttccccttctgcaacgcatcgggctctctgggcctcagtttccccttctgcaacgcatcgggctctctgggcctcagtttccccttctgcaacgcaccgggctctctgggcctcagtttcctcttctgtaacgcatcaggccctgtttcggggatcaagtcggatgagtcagtgctcaagggcatgcaggcacttgacatttattaggcacctgctgtgtgctgagcgccggtggagcatgtggggagacctcagtggagccgacgggtgcttcgggggtgatcagggctggtggggaggagtcgtccggctggaaaggggtggcccatcccgagtggggactcatttcccctccgtgactgacggctccggggctccctgcgggtctccggctttcgaggacaggaagaaggcagccagggcaggggtgggggtcctcacagccagggcagccccagcgcgttggctccaggagcccgggtgggggccgaccgttggggtgcccctccctgtcctcggccttacctccaccctggagggcaccttgaacataacaggaaatttcaaataacaggaaaccaagaccagcaaggcgggtggctccaccctgcgtcgggcctcagtcagcccccgggggaggccatgaacgccacggggaccccggtggcccccgagtcctgccaacagctggcggccggcgggcacagccggctcattgttctgcactacaaccactcgggccggctggccgggcgcggggggccggaggatggcggcctgggggccctgcgggggctgtcggtggccgccagctgcctggtggtgctggagaacttgctggtgctggcggccatcaccagccacatgcggtcgcgacgctgggtctactattgcctggtgaacatcacgctgagtgacctgctcacgggcgcggcctacctggccaacgtgctgctgtcgggggcccgcaccttccgtctggcgcccgcccagtggttcctacgggagggcctgctcttcaccgccctggccgcctccaccttcagcctgctcttcactgcaggggagcgctttgccaccatggtgcggccggtggccgagagcggggccaccaagaccagccgcgtctacggcttcatcggcctctgctggctgctggccgcgctgctggggatgctgcctttgctgggctggaactgcctgtgcgcctttgaccgctgctccagccttctgcccctctactccaagcgctacatcctcttctgcctggtgatcttcgccggcgtcctggccaccatcatgggcctctatggggccatcttccgcctggtgcaggccagcgggcagaaggccccacgcccagcggcccgccgcaaggcccgccgcctgctgaagacggtgctgatgatcctgctggccttcctggtgtgctggggcccactcttcgggctgctgctggccgacgtctttggctccaacctctgggcccaggagtacctgcggggcatggactggatcctggccctggccgtcctcaactcggcggtcaaccccatcatctactccttccgcagcagggaggtgtgcagagccgtgctcagcttcctctgctgcgggtgtctccggctgggcatgcgagggcccggggactgcctggcccgggccgtcgaggctcactccggagcttccaccaccgacagctctctgaggccaagggacagctttcgcggctcccgctcgctcagctttcggatgcgggagcccctgtccagcatctccagcgtgcggagcatctgaagttgcagtcttgcgtgtggatggtgcagccaccgggtgcgtgccaggcaggccctcctggggtacaggaagctgtgtgcacgcagcctcgcctgtatggggagcagggaacgggacaggcccccatggtcttcccggtggcctctcggggcttctgacgccaaatgggcttcccatggtcaccctggacaaggaggcaaccaccccacctccccgtaggagcagagagcaccctggtgtgggggcgagtgggttccccacaaccccgcttctgtgtgattctggggaagtcccggcccctctctgggcctcagtagggctcccaggctgcaaggggtggactgtgggatgcatgccctggcaacattgaagttcgatcatggtacgtgatgttgcggcctcttattccctggtgcgtgcatgcgtgggggccgtggctcaggggggctgtggatctaggggcagccgggtgtgtctttgctagagagggccacgggccagtgccctgtgagggtggagtgtgtgtgtgtgtgtgtgtgtgtgtgtgtgtgtgtggacaacctctgggcgttgcgggaagtgggggtgacaatgacagttaatgccgcctcttcttgttcacttcccctttagaaatggcagggcccatgccccatctctggcctctgcatcttttggggacccactctctggggctggcagaggcaccaccttggcttcctgggctgggggaatcttccctcacatccccttcagcatgaacggcctcggctttcccggtgggtaaaacagtttaatcactgaagccgaagcacagggttgattgtacacgctccccgccagccacaggggctgacaactgcctgccccgtgaaactccagtggagacgtttcagctccacaccattcagtatgggagacgccagccccacggggctacggtgcaagcagataactgaatttcgaagtgtaggttgtgtttaatttgaatctgtttatatttcggtagccccatggggcgggtggccacagtttcagtgcagatgtaaatccggaagcctccagcacctgcagctcatagacagctctcgcccaccttctcccaggaccaagccagtcccgtccagtccagtgtctgagcagagtcagaatccacaccacccgccgcctgggctcagaaagttctgctttaagtcattatttctccactgtacgatggggaatgcggtgtgtgggggccatttacccaccaacacagcagctgtgaggcacacacggctattgaaaattcatggaaattgctgggtgtggtggctcatgcctgtaatcccagcactttgggaggccgaggcaggaggattgcttgagtgcaggagttccagaccagcctgggcaacatagcgaaaccacatctctacaaaaaaatcctccaaaattaaaaaaattagcccgagcatgttgttgcatgcctgtggttccagctactcgagaggctgaggtgggaggatcacttgagcccgggaggtcgaggctgcagggagcggtgatcgtgccagcctgggtgacagagtgagaccctgtctctaaaaaaaaattaaaaaaaaaaaaaaaagaaaattcattgaaattaaatgaaagttaggccaggtgcattggttcatgcctgtaatcgcagcactttggggggccgaggtgggtggatcatgaggtcaggagttcaagaccagcctggctaagatggtgaaaccctgtctctactaaaaatacaaaaaataagctgggtgcggtggcaggcgcctgtaatcccagctactcgggaggctgaggcaggagaatcgcttgaactcggagggtggaggttgcagtgagctgggattgctccactgcactccagtctgggcgatagagtgagactccgtctcaaaaaacaaaacaaaaacaacaacaaaaaagaaattaaatgaaagttaaaaatttagtctctcagtgtattgatttgctagggcagccatgacagtctcacagatggagaggcttgaaaacagacatttatgctgccataattctggaagccagaagtctgagatgaaggtgtgagtagggctgggtcctcctgaggctgacggggatctgcccaggcctctcccagttcctgctggtggccggcgtccttgatgttccttggcttggagaagcgtcagccgcatctctgcctccatctccacaaggcgccctccctgggtctgtatccaaactcccccaactccttcaaccttttttattttaagagatgaggggccgggcgccgtggctcacgcctgtaatcccagcactttgggaggccgaggtgggcggatcacgaggtcaggagatagagaccatcctggctaacacggtgaagccccatctttactaaaaatacaaagaattagccaggcgtggtggcgggtgcctgtagtcccagctactctggaggctgagtcaggagaatggcgtgaacccgggaggcagaacttgcagtgagcggagatcaggccactgcactccaccctgggtgacagagagagactccgtctcaaaaaaaaaaaaaaaaaaaaaaaaaaaagagatgagggtctcattaagttgcccaggctggtctcaaactcctgggctcaagtgatcctcccacctcagccttctgaatagctgagactacaggagtgcaccaccaagcctggctcattttcctatttttacatttattattattattgttattattatttttttgagaaggactctcgctctgtcgtccaggctggagcgcagtggcgcgatctcagctcaccacaacctccacctcctgggttcaagcgattctcctgcctcagcctcccgactgggactacaggcacgcaccatcatatctggctagtttttgtatttttagtagagacgggattttgccatgttggccaggctggtctcgaactcctgactcaggtgatccatctgcctcccaaagtgctgggattacaggcgtgagccaccgtgcccggccgatttccccatttttataaggccaccagtcacatgggattaagggcccaccctgctccagtatgacctcatcttaactaatgccatctgccacaaccattttccaaataacatcctatgctgaggtcctgggggttaggatgtgatcatgtagattttgatgggacagttctttattttcttttatattttagagacagggtcttgctctgtcacccaggctggagtgcagtggtgtgatcatagctcactgcagcctcgatctcttgggctcaagtgatccttctgccttgggtttccgagtagctgcaattacaggtgcacaccaccacacctggctaatttttatattttttgtagagacggggctgggtgctgtggctcacccctgtaattccagcactttgggaggccgaggcaggtggatcaccttaggtcaggagtttgagaccagcctggccaacatggagaaaccccgtctctactaaaaatacaaaattagccaggcgtagtggtgcatgcctgtaatcccagctacttgggaggctgaggcaggagaattgcttgaacccgggaggccgaggttgcagtggactgagttcgtgccactgcactccaatctgggtgacagagcaagactccgtctcaaaaaaaaaaaaaaaaaaaaaagagagagagagagagagacagggtcttgctatgtttcccaggctggtctcaatctcctgggctcaagtgatcctcctgcctcagcctcccaaagtgttgggactacaggcatgagctactgtggctggccaattgcagacagatggaactgtggccagccacttcaccagtgaagtcccaaacacccctctgcaggcatgataagctagggtagttcttatcttttcctgattcctgttctctgtgtgtttagtggggaccacagcaggcagggtggggtgttggtggaatttgggataagtggagtctgggcaggcctggagctctctgtctgccttctgggcccgtgttggctgaccctgttgccccctctgccctgctttggctgagctgaattatttcttggtccttcccttctgggggcttctcgcttaacctcctttgttgtccctgataaaggggccttgttagcccgcaccttccctccttcgtcacttgacttctgcctgctcattctttgtaccttagttttagcgtcacctcctccaggaagtcttctttgatttctcctcctccctaggtctcctctaggctcccacagctgcctgtgttccctgcatgacagctctgctttatactgggcacaactttccctctttcttcactcatctgctctggctcatcttttgagtttcagcttaagtgtcacctcctccaggaagcctcctctgatttcctctcctccctaggcctcctctgggcttctcccagctgcctttgtgtcctctatcccagctcccatcacccctggtcacacaatccacctcctcctttggacttcgagctccgtgtcggtggatagtgtggctttgctggggtcccggctgtgtccccagcacccaccacacggctggcacacagtaggtgctcagtgacccagcagcacactcagaaactccctttctagccgggcgcggtagctcacgcctgtaatttacagctactcaggaggctgagacacaggaattgcttgaacccaggaggtggaggttgcggtgagctgagatcaagccactgcactccagcctaggtgacagagactacatctcaaaaacaaacaaacaaacaaacaaacaaacagaattctcacatgctgctggcagggagagtgcttgattctttatcattatatctgaggaaactgagactctgagaggtgaagcgacttgcccaaagccacacagctgggaaatggaggagttgggatttgagcccaggctcttaatcggcaccaatgccacttctcacttgggacagaaaggaagccctgactccttaggcagctgtacggagcctgggatgataacgtgctgagagccagggctactgtctgctgcaccctggggctcagtctccccatctgtacaaagggacgttccttaggtacctccagccctgagacactgggttttaactttaaatttctgatgaacaacaaatacttttttagtataagtatgccccaaatatgaataaagataaatataaatacctgccaccgacccctgcacaaaccgcaggttccagactacaagtcccacaacccactgcggcctcccttaggaactgactatcatgactttctatttttcattcattcattcaaaaatggtataggccacccgccgtgcgccaggtcttgtgctagatgccggggatacatcatatgcacaaaacagacaaaagtttttgccttcgtggagtttgacatctacatcctcgggagttttaagtgatttttgtttttctcagcaatttctgccaggacgactacagttcccgtgaccctttgtgtgtttgacgggactacaactcccagaagacctagcgcgccaggcaggcacttccttttctctttatccccaacttccttccaggtcgcaaggtcacgtcctgtccccacctttcgcccctcaccctagctcccccaacgccaaagacaaggttaagaaagtgatatcgcgaaatagttttttaaagcattttattgcattttatgacttggagtttatgtgaaacctcaacggtattagccgaacagcctgccgcaccttccgggagttccagagtgggcctacaactcccacagggctccgcgagcgccggacggacggactacaattcccgacaggcagcgcggctggcggggcggttcgccgcggtgcccacaggacctcagggcgagtgcgggctgccccgcgcggcgcccgcaggaccccggcggctacccatgccgaggtgagtccgcgggagccgccgccgccgccgtcccgtcccagctgccgccccgcgcggccccgccgccggccaggatgctggaggaagcgggcgaggtgctggagaacatgctgaaggcgtcttgtctgccgctcggcttcatcgtcttcctgcccgctgtgctgctgctggtggcgccgccgctgcctgccgccgacgccgcgcacgagttcaccgtgtaccgcatgcagcagtacgacctgcagggccagccctacggtgcgtgtccccggcccaccctcggggctccccgggctccccggccacgccactccggcccggcgatccccaggccgatccctagctccggcctgggctgcccgacccatgctcaggccccaggcgaggcagagccctgccgccctggacccccgggcgccctggaatccctgctctccttgcctagcgcccagggaccccccgcgctcgctcccacagcccccggcccctgcctaggtctccctgccccggaacccatggccgggccaagcgtcccgcgtccctggagccctaagtcccctctctcctgtccccagctgggccggcgtctgcctgccttgccgagtttctccctcctgggccccctccgccccttaggcttcctggtccgggctcacttgagcagacgctcccgtcctgacctccagctcccagggtcctgttctggagaccatctggttggtctctggattcactgggtcacgtccgtgttcccaggcctctcgcctttagctgactgcgtttggagttaaaggtccctgcactgatttctgccaggctgagccacccgacgcggtggtccagcattccccaccccctcccacggccctgggtgccaagtgcattttgtccagtgcccaaattcaactcccctgaattttctcgctctagtcaccggcccccacgtcaagggcacatttgtccccagacccctgacgctctctggtcccagttcgtgagtcatgtttcagaatctgctagcccagcttccctggtctcctcccacgtccccagttcagtccactcgcctggggttccctttgaccccctttctgtcccgcctttgatgcatacccacgccctcagctcagcctcctcacacccacttcccagaaccccacttgttccatctttccaggatttcctcttccctttccaaattcgcacccccttgcccttgcattctgcaagtctcccactcaacagcctcgccccctcccgtcgtggccctgaccccagtgtctagaccattccacatccccttgtctttgcctggctatagctgtccctgacattccagaacctggtccctggtttttcttcttttcagcctggcccctcaggtccctggaagtcaaggcctggccttccctgtgaaggagtcccgtccgcttgttctcctggcccccttagttcccagcccggattctcttggattggtccctctcgtcacatctcaggctcaacctgaggcgcggggacccccagcttctgccagcccttggggagcccatctctggagatggaaccagactttggcctcaggtcccattttgccccagagttacgatttttttacttagagccattgttgtcaaccgaggggacgctgggtgatgtctggggacatctgtggttgtcacgaccacgggtgctcctggcatggagtgggtggaggccagggacgctgctcaattccctgtagtgcccaggacggccccaccccagagaacgatccggccctaatgtccacagtgtccaggggaagcgccctggggccacagtggtggtgtataaacccaaggcccaggctctggagggtgggagtggaaggccagaggctcctcatgcagtgaccgcgttttccgtgctgcttgggattttcccgggggaagggtcctgacgggcaccatcctgtagaatcgcctccatctttgctgcctggcacaggagccagcagccacaggaggctgccgagcccccaaagcgtggcctgtgcaaccggggggcaggattttcagcgctgcttgagggtaataaacgcaagtagccacgcgtgcctgcggctctcatagcggcttccgtggggtttccagggcagtctgcaccccaaagaccccactcctagagctcgagataccctgttcacactcttggcatctcctgcctggtcctccagctcacccggcctccctccagccccccgggcaggtgtgatctggtggctgctacactgtccctgggcaggtgtgggccccctttctctccccaagaacccacccagggaatgcatgttggcggctccctacactgtccctgggcagatgtgggccccctttctctccccgcaagtccgcccagggaatgcatgttgtctatcgagtgagcagatgtctccccgttccacggccagacggacgccctctccagcctcctagagtccctcccagtttccttgtgtggcctcttgttcttcgcagcctcctgacgttcaccccgttttccttccccgattccctcggcccctttttggtggcgcctccctccctttcccctgcagtcctttctctctttcctcgcttctctggggcctttgcccacaatcctgggttttcttctgagtcttcttttcactggcctcctcccctgtaccctcctccctggaccccagcttttctttctcctagtgaggaagctggacgcagctttccctgtatgtggcattcgcccagctggtccgtgggctcccggggtgagcggaggagcccatggggcagccgccctgcctcagcctccatgctcctcatctgcgccctgggaagcacagtccagctctcgcagggtaggcgaggcccagccagcacacccctctgtgtcactctggccgcccctgagagactgggggtggtttgggccagagccctgccgaggacaggcccttgagaagccccagcgtgctgcctttgaggccaccctccaccaccatcttcccggtgtgctttcacccccgggcccactacccggaggagctgcaacccttactcgctggggagtcctttcccaacttccttcctgctgctgttgagaggcacagggcggggcggtgccctttgtgtttgggtgtgatctgggtctcactggccaggtgcacagcacccctctcctgggagtggactctggccctgccgggtgaaggctttctcggctcggtggccgttcacagcaggtggggctcgttgagcttatggcccatgtgaggtgggaaccttagcaccccttggagcgcccagctcccaggacccgtcaagtccatcagacttgccaaaactccttcatctgggatacagctaactgcagcctgtaggtcacgtctggctctctgcctgttgttgttaataaagttttatcggcacgcggtcatgcccatccattggcatcttgtcgctggctgcttccacgcagaaacagctgagcccagtgattgtgccagagccctatggcccgagaggggaaaggttggccgtctggcccccgatagatagacaggtgcccaggccactgttcaggtccagtcctgtcacgccaactggtgacttctctcaggatgcccggtgccctccatggcgtccaccacaagtggtctcagcccattcagacgcgggtctgagggagttggtgctggtttcgcctccgcagagggccgtgtccacactagcttgtggccacccggcccgaccctggccctcgagggaggctggggccacccaaggccatctgttctcctggggagatgggccttggccacagagagcccttgccattgggccccgagcgagcgggggctgggatccagagggcagtgtggccttggctggtgctgacgcgaggcggggctccgatgggcggggcttcggaatgggaggccgtggccttcagggagctctgggtgctggtgtccccctccgttcctctgacttgctgctgctccttcccttctccctcctcgctcactccctatcccgcctgcgggagctcgaggcccggagaacgggggtgcctgccagttggcctcatctcccggccccaaaggggtgacattcgagtcacccctgggaggccagggcatgtggggacaggtggggtgcaggggaggggtgctcccagcactgcaggagccccaaggactccctcgaggtctttgctgccatgtccctgaggggcctcccaagggcagaggaaaggctcccagcaggcctggtgatgtcaggctctgagaggggagcaggggtgaggctgctgggcctggggtgcgtgggcccctgtggctcctccatcccaggcctcagagctggttctctgtgcccacctccttgtgctgcacccgagaccccgcccattcccacctgagacctgtgtcccgcctgtccccccatgcacccagctcagcccatcagacaccccgttggagcaggctgcttccctcccaccgcttcccagacagcacattgctggacacagagctggggactcatgcacgcccctggccccaagcccgaggctcagcgcaggccccgggaagagctgcgtctgtggggagatgagagaatgagggtccccagcatccagcatccaccttcagagcgaggctggctcccacggggacgctggagtcggtcctgggcatcgtgattttgagtgcttcctgcacgggtctcacacgggaggctccggggcccgcccccggcccccctgcgtcaggcctgtacccggcccccctgcgtcaggtctgcttgcgggctttgcgtggcattctgttggcttgtgcagcgctgagatgttttagagcgttgcttgtcttttaacatttgggtgatgtgacgtaagaattgggatttccggcttctggggtggtccactgaggtccgtgtccccagctgaacgtgggtggcccttttagaggggccggtgctctccagggtctttccagggcaactcaggtggccatcgcggtgtgtggcgggcagcagggagatcgtcgtggtgcgtggcgggcagcagggagatcgtcgcggtgtgtggcgggcagcagggagatcgtcgcggtgcgtggcgggcagcagggagatcgtcgcggtgctgagacttgcaggggtgaagtggcagcaagtggggggtccgtgtgcagctcaggtgtgcggagcagggacccctgagctgcgtcttgttgggtggaggacgttttgctgagagaggagggaagagcagtcccaggaagcaaaaggcagcggcgaaaccagaagccctggcgagtttccagagcggtgaccgtggggagcgccaccgcagaagtgaataagcccgtgatggagcgacagccccaggctctcagcgacggccgtggccttccagggaagaccccgcctcgccccagagacaccatagcccaagctgctgagccttctgccaccccagcccctggatttctagaaagcttacgtgtccaaggcgcagtagggtggtcctagagcaggcgagcccgaggggcgctccatgctggtcttgtggctcaacacaggggtttaacctggggcccatcaacaggcttcagggaagggccgtccccatctgggaccccctgtaacaggagttgaatccagcctgcccttggcctatttaagagttttgttggcacacagtcccacttgttggcttacctgttgtatatggctgcactcaccctgcctgcagttttacagctgagtggttgagacacagaccggaaatactcactctctggcctgttgtagaagaggtttgccgagccctggtctaggatcctgtgtagacttcggtgtggggtgggaagtgtgggtttctcccaggagaaggggctctgctgtcattagaaaggggccgggcacggtggctcacgcctgaaatccctgaactttgggaggccaaggtgcgagtatcacctggggtcgggagtttgagaccagcctggccaacaggcaaaaccccgtctctactaaaaatacaaaaattagccgggcatggtggtgggtgccggtaatcccagctactcgggaggctgcggcaggagaatagattgaacccgggaggtggaggctgcagtgagccgagattgtgctgctgcactccggcctgggcaacagagtgagaccctgtctcaaaaacaaaaccaaaaaacaaagattctcaggaggtctgagacccagggttcgcgtggcactgagcctgtgggcatggacccggcacgcgttcatggcccctgtgacccgttatgtcgggggcaggctggggggaccctgggagcttctcgaatcggtggtcttccaggttgtgggctggggctggggctggggctgctgagtgggtccctggcctggatctgtcccctcccgtcggcctggccacccgccgaggctcacgaccccgcccctgtgcccacaggcacacggaatgcagtgctgaacacggaggcgcgcacgatggcggcggaggtgctgagccgccgctgcgtgctcatgcggctactggacttctcctacgagcagtaccagaaggccctgcggcagtcggcgggcgccgtggtcatcatcctgcccagggccatggccgccgtgccccaggacgtcgtccgggtgagcgtctgccctgccccgcccggctcaggtccagagctgcggcgggagttggaggcaactgtgtgaccctaggcgggtcacttcgcctctctgagccctttggaaagtaggatggactgttcccctgctccattgatctccaaggggtgattctgtcttcagaggacgctgggtgatgaccggaggtgttcagggagggccgctccgggcgtggagtggatggaggccagggatactgctcagcaccctgcagtgcccaggacggccccgccccagacagtgatctggccccagggtccacagggctgcgcaggagaacctgcctagagtgaacaagacctggtagaatccagcagacgccctgggtgaagatacttttgcagatgagaaggggtgggtgggttgggggaagccctggttttctgtgagtgcctcatggttcatgccgccctctgagggcctgcctgccctccagggacagtcactgggccccctgctaccccctccagggacagtcactgggccccctgctacccccaccagggacagtcactgggccccctgctaccttgccacccccaccaggccagcagccccctaagtgtgtgtctgctccacagcaattcatggagatcgagccggagatgctggccatggagaccgccgtccccgtgtactttgccgtggaggacgaggccctgctgtctatctacaagcagacccaggctgcctccgcctcccagggctccgcctctgctgctgaaggtgtgctctgggctgcagggacggggcccgtgggcgtgggtgtggggaggcgtccccatcccaagggctgcggtcaccctgggctgtttctgctctcagcgtgtggcatcccttcgccggggttaacagtgggggttcctgggccccgtgtggacctgctacatcaccacctccgggctgggacctgggactctgcatttttgcagccgcctgtcccccctcccagctgctggctctgtgcacacgaaagaccagaaccacggactcaggaggagcctttccgatcctcaggggctcggggtttatgaaacacacgggcatctgttcagttctctacctgccaaggacattctcagcatcacatctcgagtgggcggcgtgggtgcgtcggcggtgtccttacggagaaggggcacacgcctttcctccagccccgtgaacgggggccctggcagcgaactcagagcaggaacccggagctctgtggtgggacctgtggtggggaaagatgggagttgccgctgtggagagtgaggagaaagaggaactggagaagccagctgaggggcttgcccggggctgtcatcagctactgggggagcagggctgagaagggaggccagagcccagggccgcagagaacaggcaggtgtgtcctggcccagccccaacaaaaacagtttggtgctgtggtttcaagctatagtaaaggaggctgaggcgggtgggtcccctgaggtcaggagttcgagaccagcctggccaacctggcgaaagcctgtctttactaaaaaaatagaaaaagttagccgggcgcggtggcaggtgcctgtaattccagcaacttgggaggctgaggcaggagaatcacttgaacccggaaggcggaggttgtggtgagctgaggtcacaccattgcactccagcctgggcaacaagagcaaatgtccatctcaaaaaaaaaaagtttcatcctacacagccagatcagtggaattccagatgcagagttggctaacactggccaggggccacctgtttttgttgataaagttttattggcactgggccacattcatttatgcacagtccacggtggctttcccagcagcagaactgaattgccgtggctgcggcagagaccatccagcctgcaaagccgaaagtgttatctgatcctttgcagaaaacgttcccaacccctggtttagattaaaagtcttgacagtggccatttttgttgtggtaatagaagagtatagttctgcagatacctaagtatcctgttagagaagaaggaaagaggagtcgtcttctttttttttttttttttcttttatgagacagagtctcactctgttgcccaggctggagtgcagtggcacaatcttagctcactgcaacctgaaggaggaatcttctacttggtggagtattatgcagctggtaaaaatgatgttgagggccaggcaaggtggctcacgcctgttgtcccagcacttacggaggctgaggcaggaggatcgattgagggcctggagtccaagattagcctgggcaatatagcaagacccttgtctctacagaaaatttaaaaaagccaggtgtggtggtgcatgcctgtagtcccagctgctcaggaggctgaggtgggaagatcacttgaacccttgaacctgggaggcagaggttgcagtgagctgagatcttgccattgcactccagcccgggtgacagtacgatactccgacttgaaaaaaaaaaaaattacagagagttcccaggagcatgcttcccccagtgatcatatctttttgttttgttttgttttgtttttttgagacggagtctcgttctgtcacccagactggagtgcagtggcacaatctcggctcactgcaagctccacctcccgggttcgcgccattctcctgcctcagcctccagagtagctgggactacaggtgcccaccaccacgcccagctaattttttgtatttttagtagagacggggtttcaccgtgttagccaggagggtctcgatctcctgacgtcgtgattcgcccgcctcggcctcccaaagtgctggtattccaggtgtgagccaccgcgcccggccgatcatatcttacatacctatgatgattgtgttttcatttttattttattctttcttattatcttttattttatttcaaaagattgtatttttaggccaggcacagtggctcattgcctgtaatcttagcactttgggagggtgagacaggaggatcgcttgatcctgggaggtagaggctgcagtgagccatgtttgcgtcactgtactccagcctgggtgacagcatgagaccctgtctcaaattaaaaaaaaagttgtgtttttaaaatgctttaaagcacagaagtgcggactcaaagttgtgtgaactcacaggcattttcgggcaggtcctggccctaagtccctaagtgaacagctgttattgagggcccgggaggaaaggatcagaatggcatggaggagaaattccccagcagaacgttccagaaaggagatgtgaataatttcgagagaaggttgtcctagggggagcacgggcatcctgtggtatcgaaatctgctggtcacgtccccacacccggctggttggctctgcccgagcccccaacctggggtgtcagtgctggggatgccccctggctggggccctggctgggccaaggctgatgcgccctctccctctccctagtactgctgcgcacggccactgccaacggcttccagatggtcaccagcggggtacagagcaaggccgtgagtgactggctgattgccagcgtggaggtgagtgccgcctgccccggagccagccccacgtccccaggggttcctgccatccgcctggctccccggctcggccgtactagaggggagccgctgatgggaaactggagtcggatcgcccccctgcctggctgaaaacctcctgtggctccgctggcagctgcaggaacccaaactcctcacatggccggggagtcgctctgtggagtgcccaggcccctgccagcccccggcccatctccttccttccatcatggacccccacacaccaagccgctgcctcccaccccagggcctttgcaccggctgcccctcccaggaagccccctccaggctgcagtgtcgccagccccctctcatcacataacctcacccgtcagcccagacgctgcgtcctcacagacccttccgagcaccccgggatatcagcagagtcaagagagggtggggagctgccggtgcggaagtagcctctcggatcatcagggcagatccagagggtgaagcctgtgtcgctgctgctgcagcactggcaggggccttaaaacccgaggaagcacccaccgactcctctagcatttccctgcgggacggcgccggtgaggggtgcagatgagtccacacagatgaggggttgcctcactgtcgggggagccctgaacaagacgtgcttgctgttttggggacccaggccttgttggggggtgcccgagtggaaaagcagcggcttaggccggggtggggaaagtgtcctggaggccccggctccccatagacaggccttggcggaggagccctggggtttgtcgatggcggctgttctgtttgttcctgttggattgtactgtgggcccgggaggcgcgtcctattcccagcgccagttagtgtgcagtgagacccggtagcctggcctgcgtcactccacagtggcacaggcgctgggctccgcatcccatggggccatgtcgattccctttcccctggctgtgccctttctcctgtgagcagagccctcttggcagctgggctttgagttcagccgttgaaggatctccaagtggaaaagcatgttgcaaaaacagcaagtagactcccacagccagacggggagtccccaggccacagccggccctctacctgcttttgtaaataaagtttttgcttgtttgtttttgttttttgagacagagtctctctctgtcacccaggctggagtgcagtggcgcgatctctgctaactgcaacctccgcctcccaggttcaggcgattgtcttgcctcggcctcccgagtagctgggattactgtcatgtgccaccacgcccagctaatcttttgtaattcttttttttttttttttgagatggagtttcgctcctgttgcctaggctggagtgcaatggtgcgatctcagctcactgcaacctccgcctcctaggttcaagcgattctcctgcctcagcctcctaagtagctgggattacaggtgcccgccaccacggccagctaatttttgtatttttggtagagacggggtttcaccatgctggccaggctggtctggaactcctgacctcaggtgatctacccgccttggcctcccaaagtgctgggattacaggcgtgagccaccgtgccgggctgtgtaaataaagttttatggcacacagccatgctgatgcatgtgcaagccgtccatggcagtttcttagttgtaacagacaccatctggtccccaaggctgaaaatatcccctctggccctttatgaaagtctgctggcccccgggctagagcagaatccgactttggtggggtaagaggcagggaggggtgcacacagaccctgaaggaacccgaatgcctggctgaggggctcagccccgttcccacaaacagttatcctcctgaggggctcagccccgttcctataaaaacttaacctcctggccgggcgcggtggctcacacctgtaatcccagcactttgggaggccgaggtgggcggatcatgagatcaggagatcaagaccatcctggctaacatgatgaaaccccgtctctactaaaaagtacaaaaaattagccggatgtggtggcgggtgcctgtagtcccaactactctggaggccgaggcaggagaatggcgtgaacccgggaggtggagcttgcagtgagccgagatcgtaccactgcactccagcctgggcgacagagtgagattccgtctcaaaaaaaaaaaaaaaaacacaaacaaaaaaaaaaaacttattctcctgctctccccgatttttaaagatttcgacctgagggccagagcaggagtgggtccctgttcccggctctacctcctccctggaggagctccctggggctcccagagtcagaggctggcacctcctgtggtcctcagtgctgaggccgatgctggcacccagcggacgggccccacgtggcccagaggggaggggtctccaagccccacacacgggtcacctgccccaggaacagccaggccattcccctgctctctatccacaggggcggctgacggggctgggcggagaggaccttcccaccatcgtcatcgtggcccactacgacgcctttggagtggcccccgtacgtatgtgtgtccccattccccccaccccacagggcttggattctggctccagtccagtgccgaggcaaagcgcctgtaggggatggcggccagggtcagcggctctccctgtgacggcctttgcccgtcatcctggtccccgcgagggcctcagggtgggtgtcgtggggctgaaacaggcccggctcttgccccggggtcgcaggttccagggcacggcggtgtctgtgtcagaggctgagcccagggagtctgagtcagggttccccgggccagcgctgggtgccgtggctccacacgaggcctcctcgaggctgtggtttgtcccagcgagcggtcatggagcacgtagcagagtccgcgaagggaaaggcgcgtgcggtgagttggggaggccagtcctggcttccaggccctctccctgtgtgtcacgtggaacacgcctcattgtcagcagtgagctgggacgacagcccaaagcactgtcaccagcgagacttccagagacccagcgcccggttcctatgggagctggttctacagcccctgctgcctggcccatgccgggattccagactccggagggaagcagggcccgtgtgtaaaccatggtgtttgcaggaacagctttggacccagagcctgtcctgtcagcgagggtcgggggccctgctgcaggttcctggtctcaggcctgcggcacaagcttggttctgctcagcgtgggttgagcgggagtggggtgggggggcatgtaccacggtgtcaaccagcaccctgcctcctcctttttttttttttttttttttttttttaattgagacagtcttgctctgtcccccaggctggagtgcagtggcacaatctcggctcactgcaacctctgcctcctgggtttaagcgattctcctgcctcagtctcccgagtagctgggaccacaggcacccgccaccacacctggctaattttttttatttttagtagagacggggtttcaccacgttagccaggatggtctcgatctcctgacctcatgatttgccctcctcagcctcccaaagtgctcggattacaggcctgagccaccgcacccagtcctgcctcctttgaacacaaatcagctgaaccaggcagagtgcggagggtctgggcagatctgctgcctggctgagtgcccgaccccttggagggccaggcccccagccttgagaatgcctggtcccgctgggcccacacaaactcaagctgctcagagcaatgcctcttgaactcctgacctcaggcaatccacccgcctcggcctcctaacctgctgggattacaggcatgagccaccgcgcccactgcctttctctgtcctcattgtcccctatgaagctttttttgttttaaatttattttatttatgtatttttttttttttttttgagacggagtctcgctctgtcaccaggctggagtgtagtggcgagatctgggctcactgcaaccttcgcctcccgggttcaagcgattttcctgcctcaacctccggagtagctgggactacaggcgcgtgccaccacacctggctcattttttgtatttttagtagagatagggtttcaccatgttggccaggatggtcttgaactccagaccttgtaatctgcccatcttggcctcccaaagtgctgggattacaggcgtgagccaccgagcccaggcaaatttattttttgagataatgatagaacataaagttcaccattttagagcgtacgagtgggttttagtacatccaaagttgtacggtctccacctctaattccagaacattccatcaccccaaaaagcagcccctccccatcagcagtcactcctggtcccctccccagccccagaaccccagcatgtgcgcatccgtcccagtgcctgtggactggcctgttggacgggtcctatgaacagatcctacactgtggacaaagtcttttggatctggcttctctcactgaggagggtgtttattgtccccctgaattcagtgccaccgaggtcccctttatatgctgtggccttgggacggtcccaagccattgcaatgtccaagaaacagtgtggccttattgagaatgctgctttagatcacaaaggtgcatccaagggcgggaagggcatgtggtcgggctgtgcaggtctctccacagccggggctcgagggtggaagggtgggtcccacagaggggaccccgcacagagaccagggctggacagatgctgccctctgtgagcgaatctggcctggccctgggctccaaattctgcatgtagcttctcccgggcgcgggccgagccgaggtggatgaggagagtcctgggcttggcggggccccgcagaccccaggccatcagtcggggattgaatacaggaggggagcgaccacagctgcccactggacgtggcagaggggctgggggacagcacagagatgaccgtggctgctgtgggcagaggtcatggggctacgggagtagggtgggggtgacggagagatgactgtggctgctgtgggcggaggtcatggggtgcgggagccgggcgggggtgactgtggccttgcctctcccgtccctgtagtggctgtcgctgggcgcggactccaacgggagcggcgtctctgtgctgctggagctggcacgcctcttctcccggctctacacctacaagcgcacgcacgccgcgtgagtgccggggtgggcagggggatgggggtgcgggggccacactgccggacagcgctgcccaccaggcacctctgcagatgtttctctggagcctcctggccccaaagtgggcctgagcccaggaattggggcgccttatttatcgagggctaagctgagccctcgcaggctctgtctcttggagtcccacagggcccagctgctgctcaccccaggaacctgctgggaatgctgtcagctgcaagtgttagagacgcccggttaagggccctggaactaggggatcccctcagccctgtgtggtcggggccggatttttcgctgggggtgggggccgtcctgggcactgcagggcgctgagcagcatccctgccccactcactccatgccaggaacacgccatagtcatgatagccacaggtgccctccgacatcacccactgtccgctgggggcagaagcacccctggttgagacccccctgggttagggaattccacgggcccccgagagactatgtcccgtgatcatctgccccgctgaggtcccaggaggctgcacacattgaaatccacaccctgagtaggaagggagagaggaggtgaatcccaggagctggggtccccctggtttatcccgtctaccccgttgggagtttatcctggtgtctggtgtgagcagggggcagacttgatttttccccagataatgaatgcaggcttcgtccccgtggccctgtggatgtcttctgtgcatgactctctcctgggtgccacccactccatcccaggagcacccccagacgtagcaaccacagatgtctccagacatgactgtgtctcctgtgcggggtggggtagaatcacctccgggtgagaccccggcccagtcacctgctcccgagatggtactgctgcagtcattgtgtcagcagctcagagaggccagggccactgtggctgagacgtttctcagccttctcacagtcacaaggcgccgggagtcatgtcctggttcaggcaggaacttggactcgaactcctggcctcaagcgatcctcctgcctcagcctcctaaagcactaggattacaggtgtgagccaccatgtccagccaaaacttgtttttttttttttaagctgcagaacctcttcccccagccccccactgatgccttttgagaagctcatgctgtcaaaaacgtgtgaacggggctggtttctgccaggcctgggggcttcttggcagctggggagaggttgggtttctggggcagagggaaactgggttggagagagtccggggcagatgtgggaagatgggggtagggggcgtgctgagcagtttccttctctgactctggtgacccttctaatagccaaggctgtgttccattagaatttttggcctgcctgggtggcttatgcctataatcccagcactttggaagcctgcggcaggtggatcacctgtcaggagttcgagacctgcctaacgtgttgaaaccctgtctctactaaaaatacaaaattagccaggtgtggtgctgcatgcctgtaatcccagctacttgggaggctcaggcaggataattgcttgaacccgggaggcagaggttgcagtgagccgagactgcaccattgcactccagcctgggcagaaagagcgaaactccgtcccaaaagaaaaaaaaaaaagaattcttcttctttaagtgaatagactttatttttttgatctcctcgtgtctgttgcctggtcggtcaccccggttcctcctgggctcagagaagcctctagagctggggtctaacgtggggtggccctgctgcctggagacactgagtgatttgcagttgtcattgggggaagctcccggtatggggtgggtgaggccagggatgccactcagcaccctgaagtgcccaggacagcctcacctcagagaaccatccagccccagtgtccacagggccgaggggtcatgccccgccctaaggggctggtcaggatttcctgctttggggagaccttcatacccttcctgggggacctgtgacctggcctggtccctcctccaccccaggcgcttgcccgtcaaagctaacactgggtcttccctcccagctacaacctcctgttctttgcgtctggaggaggcaagtttaactaccagggaaccaagcgctggctggaagacaacctggaccacacaggtgagcggccccgggtgggggtgggggtgccgcggtggtggtgccgtggggaggcacggaggcccaggggttgccatgggggcagccaggaggcacagagggagggccgggggccacttcctggtccccacccaccccgccagctctcggtgtcctgcagactccagcctgcttcaggacaatgtggccttcgtgctgtgcctggacaccgtgggccggggcagcagcctgcacctgcacgtgtccaagccgcctcgggagggcaccctgcagcacgccttcctgcgggagctggagacggtgggtgcccctttcatggatgggtccggagctctgcggagcacacacatcggggccgggttggggcatcctgtcccagggtgtccttgctgtccgcccctcaggctctgagggccacactgtgtcggggtcgggctggggtgttctgtcctggggtgtccttgctgtccaaccccggggctctgaggggcacactgcgtcagggccgggctggggtgtcctgtcccagagtgtccccttgtccctccttacccactgctcattgcccgccggggctccagcaggccttagggggaccccgggggcaggtggatttctcctcattttgcaccctcgggggttctgggaggcccctggagcatttggggaatgggctggggtggccgccatccccgcctgccctctgctaatggcgcctccggctgcaggtggccgcgcaccagttccctgaggtacggttctccatggtgcacaagcggatcaacctggcggaggacgtgctggcctgggagcacgagcgcttcgccatccgccgactgcccgccttcacgctgtcccacctggagagccaccgtgacggccagcgcagcagcatcatggacgtgcggtgagcgcggcagcacctgcccggcccctcctagggctttcctgggggctgagccactggtcgcaactgcagaggccatgagagcctggagggagcggcccccacacacaggctgcgaggaaggggccggtgcgtggccaaggccggctgcacggtcaggccgttcgcaagctcttccttactggggctagggagggcgaggccagcagcctgaggtcgtggccccatataggacccccagaccccgtcacctgttgagttaggagcaagcagctcctgcctctgggcctcttcagggccctgccacagcccgaaagtcctgcctggccccggccaccgtcttggggagcctggcccgccaccacaccccggcccttcctcgccccgcctccctctgggcactgtgtctctggcttcttatgtcctctgaccctgtgtcctgcccgtctctctgccatcatgtgagcccctgggcaggcttttgtggagcctggaactgtctggccaccccaggcacactcctggccagtcctggcaccagcaggtgggcgccgtctcctcccccagcgcccgcagtcccggcatagatccttcccgttcatccactctgctctgcggtcactgggccctcaggagtggtttgagctcagccatcggaggcctgcagaagccagtggcgggagggaggggcacatccctgggtaatcgcagtcctggaaaggatggaggtggcggtcgcccaccagccaggaaagattgccaggaaatgagggtgggtgcacggctgtcccagctgtgctgagctctctcaagaccaccaggggtcagcccaggagggccacctgggatttgcagagggtcccagaatggattcttccaccaggacggaatagtccagtttaaattctggaagagcagaaaaccgagtcagaaggaaccaaggcctcagggcgtgagccttacctgcgcacagggacgggtcagggcaaggggcctggaggtgtggggcccccagtgaatctgcatctacatgttagccaagtagttaaagctaagcttaatttttttttttttttaaagacagagtctcacggtctcctaggctggagtgctgggattacaagtgtgagagctaccttgcctggcccaaagtccacattttaaaacattgtttttgaatcgtgaaggtcccgggtggattctaagaccctgacccgtaacacgaggatcattgcagaggccctgactcgagtcatctacaacctgacagagaaggtgagccctgagccctctgtgccgccagacccagccccagccctgcccccggccccggccccacccctggccccagccccactgcaggggcctggactcagggccatcccctcctctctccgcaggggacacccccagacatgccggtgttcacagagcagatggtaagggggccaggccagtgggtgggtgggtgggcggggccaggccatgactaccaccaccgtccctacagcagatccagcaggagcagctggactcggtgatggactggctcaccaaccagccgcgggccgcgcagctggtggacaaggacagcaccttcctcagcacgctggagcaccacctgagccgctacctgaaggacgtgaagcagcaccacgtcaaggctgacaagcggtgaggctggggctccgcgctggccccgttcagcctggggccgagggggacctccccctactgcatctcccaccccctcacccctgggggatgccaggtggagcaaatacaaagagagggtgggatgagggccggacacggcggctgtgcctgcaatcccagtactttgggaatccgaggcaggtggatcacttgaggtcaggagttcaagaccagactggccaacatagtgaaacctcatccctactaaaaatacaaaaattaggcggatgtggcagtgggcacctgtaatcccagctacttaggaggccgggacggaagaatcgcttgaacccaggagttggagaccaacctgggcaacatagcaagaccccatctctacaaactttttaaagtttttatttatttgtctttgagatggagtcttcctctgtcacccaggctggagtgcagtggcgtgatcttgtctcactacagcctccatctcccggcttcaagtgattctcggacctcggtctcctgagtagctgggattacaggcacccgccaccatgcccggctaattttttttaatttttagtagagatggggtttcaccgtgttggccaggttggtcttgaactcttgacttcaagtgatccgcctgcctcaacctcccaaagtgctgggattgcaggtgtgagccatcgtgcccagtctccatctctacaaacccttttttaagaattagctgggcgcagtggtgccccctgagaaagtgctctctccccagggacccagagtttgtcttctacgaccagctgaagcaagtgatgaatgcgtacaggtgagtggtggccagcgggacctggagcccttcaccccctacgggttacagccgaggggactgcggcccacgggggtctaggggttcatgttactgccgcgcaccatcctcgacctcagggaccctgctttctccacagagtcaagccggccgtctttgacctgctcctggctgttggcattgctgcctacctcggcatggcctacgtggctgtccaggtgagcagtgcccaggctcaggtggggcaggggccgcccgccgggaggagctgggctgggcgtctccaagtgcatcctggcccctggctcagcctagagtcacatgacctggggctctggccccgcccacatcctcactccctcctgctgtgtccccagcacttcagcctcctctacaagaccgtccagaggctgctcgtgaaggccaagacacagtgacacagccacccccacagccggagcccccgccgctccacagtccctggggccgagcacgagtgagtggacactgccccgccgcgggcggccctgcagggacaggggccctctccctccccggcggtggttggaacactgaattacagagcttttttctgttgctctccgagactggggggggattgtttcttcttttccttgtctttgaacttccttggaggagagcttgggagacgtcccggggccaggctacggacttgcggacgagccccccagtcctgggagccggccgccctcggtctggtgtaagcacacatgcacgattaaagaggagacgccgggaccccctgcccgatcgcgcgcggcctccgcccaccgcctcctgccgcaaggggcctggactgcaggcctgacctgctccctgctccgtgtctgtcctaggacgtcccctcccgctccccgatggtggcgtggacatggttatttatctctgctccttcttgcctggaggagggcagtgccagccctggggttctgggattccagccctcctggagccttttgttccccatgtggtctcagtgacccgtccccctgacagtgggctcggggagctgcatcacccagccttccccttctccgactgcagggtctgatgtcatcattgacagcctttgcttcgtgggggcctggcagggcccctgcctccccgacccccgacccactgcaaatccccgttcccctgcactcctcttctcccagcccatccctccggcccctgtgcctctgcggccccagcccagctcccagggccgtcacctgcttggccctggcccagctccctgccctgagtcctgagccagtgcctggtgtttcctgggctcggtactgggcccccaggccatccaggctttgccacggccagttggtcctccctggggaactgggtgcgggtggagtactgggaggcaggaggtggcccggggaggccttgtggctcctcccctcgctcctcgccctgggcctcagcttcctcatcaatagaaaggatgtgttcggggtgggggcgtcaggtgagaacgtttgctgggaaggagaggacttggggcatggcctctggggccacccttcctggaactcagagaggaaggtccgggccctcgggaagccttggacagaaccctccaccccgcagaccaggcgtcgtgtgtgtgtgggagagaaggaggcccgtgttgagctcagggagaccccggtgtgtccgttctttagcaatataacctacccagtgcgtgccgagcaggcttggtggggaagggacttgagctgggcaagtcctggcctggcacccgcagccgtctcccttccgtggcccagggaggtgtttgctgtccgaaggacctgggccggcccatgggagcctggggttctgtccagataggaccagggggtctcactttggccaccagttcttcggccagcacctctgccctccagaacctgcagcctggaggggtgaggggacaaccacccctctttcctccaggttggcaggggaccctcttctcccgtctgccctgcgggttgcccgcctcctccagagacttgcccaagggcccatcaccactggcctctgggcacttgtgctgagactctgggacccaggcagctgccaccttgtcaccatgagagaatttggggagtgcttgcatgctagccagcaggctcctgtctgggtgccacggggccagcattttggagggagcttccttccttccttcctggacaggtcgtcatgatggatgcactgactgaccgtctggggctcaggctggtgtgggatgcagccggccgatgagaaaataaagccatattgaatgatcgccaccagtgtttggtctgggggctgtgagaattggattgtgacaactgttgggggttcatgttcctccagggggtgacagtaggggcagggctgtgtggagagtacgtcactgacttgccctctgctggagtgaggctccagcctatcgtgggccaggcctgtgcccaaggctgctgggccgtgcaggagaggagggcctgtgtacagggtcttgtaggtgatggatggacctgtttcctgggccaccatcacaaagcaccaccaactatggggctcagaacaccagaaatccacccttagtgtctccgaagccccaagtccaaagtcagggtgttggcagggcccccagggcgggtccttcctgcctctcctcccagcttctagggctcccagcatcctcggcttgtggccgcgtcattccagcccccaccttgtccctgtcttccaaggacctccgtcacattggatcagggcccatcttgctccaggaagatgttccccctaactaatgacctctgccaagatcccatttccagttgaggctaaaggctgaggttgttttggacatgaatctgggaggactctgcaaccctggatggcgggcagtgggctgtgtgaagtcggcttccaaccccagccccaggttcagagaggtcccagcagggcaccatactcggctagctttggtttactgagaacctacacagcaggtgcagaactagggttggtccctcctggtcagaagccccggggaccctcccaggttctgcccggtgcccaggcccccttcctggcctgcccagctgtcgggctcagtaaatgctggtggagctgccatgtgtccctggcctgagatccgtgctctcggggaaggaggagaggcagagatgtgccggtgagaagaagcagggagaggtgggggcgtggggaggccagggcagctgaggaagctgccctgagggaggcagtgtcctgcagactggctggaagggagggtgtctgagctgcgacctgaatgatgaggcagccggggtgaaacctggaggagaagattgcaagcagaggcacagcccacctgtgcaaaggccctggtgcaggacggcaccgggcgtgttggaggaacagcaggaaggcctgtgtggctcgagcagagggagtgagggtggggaagggacagggcaggttgtgcagggcctggtgggccacggggaggacttgggctttgaccccagggcagctgggagccatggagggctgtgggtagaagagcgacaggccctgactcaggtgctcccaggcgccctctgacggctaccgcagggaggacagacgggagtggcgagggtttagcctaggaccgggtagaggtgactgggctggcacaagtggaggcagagaaggatgggctcatcctgttccccctccaccgctgtgttcctggagtgcagaggaggggctacagagatgcttccagaaccagtgtgtggcctggaccaagacctggactgctgggggcttcctgagcaagacccacatccctgcagtcaaagctgcctcttctcagaccagggaacttcagaaacaggcagggaacccacccccccaccagggtcccctaggaatcggcaacagagcctcaaacccagcacggggtctctgcctccccaaaacatgtggcaggagaagcttgttcaggagggagaggagggaggggatggacccagagcgaaaggcaggcagggcagggttgcaggaaaagaaagaggctcacctgactccggagcatggggccgctggccactggggatggaatggcgggggcagtgcttacctgaccccggagcatggggccgctggccactggggatggaatggtgggggcagtgcttgggcttccctgggcggcgagcagaggccaggttcggcccccacgtgctgtgtggccctggggcatgggggctgtgcctccctggaccaaattttaccagttcagggggctctagggtccaggggtttgaccttcttggggtcctgcgtgattctccaggagcttagcagggccaagagtggacagtggctgcccacctctgtgcaggcagaaggtggctttggccccatcgtggacccaggcaaaccccattttagaggaaaagccagcccatcatcttccctgctaacatacacaggtaatttttcctttttttttttttttttagagacagggtctcacacccggcatggtggcttcacgtctgtaatcccagcactctgggagtcagaggcaggaggatcacttgaggtcagagtttgagaccagcctggccaacatgatgaaaacccgtctctgctaaaaatataaaaattagccgggggtggtggtacacatctgtagtcccagctactcgggaggccgaggcagaagaatccattgaacctgggaagcggaggttgcagtgagccaagatcatgccactgcactgcagcctgggcgacagagcgagactttgactcaaaaaacataaaatagggtcttgctctgtcacccaggctggagtgcagtggtgcaatcatagctcactgcagccttgacctgggctcaagtgatcctcctgccacagcctcccaagtagctgggactgcaggcaaatgccaccatgcccggctacattttgtaaatatttttgtagagattggatcttgccatgttgcccaggctggtcttgaactcctggcctcaagcaatcctctcacttcagcctctgaacgcactaggaatacaggcatgaaccactgtgcccggccggattagtttcattcaactatcgattcagcgaacacttgaactctgctctgccaggtcctgtgccaggctcagggatacaggcgtgtgcaagagacgctggcctggacgccatggggctcgcagtccactgtgggagttggataataagtggtcaagtaggtgggctgccttcagatggtgatcaatggctgggtgctgttttacaattgagtccacactggaggctccctgaggagggactttgaggttttgttttgtttgcttgtttgtttttttgagacagtcttgctctgtcacccaggctggagtgtagaggccctatcttgactcacggcaaccttcgtctcctgggtccaagcgattctcctgctgcagcctccctgagtagctgggactagagaggtatgccaccaaattttgtatttttagtagaaatcaggttttggcatattggccaggctgaccttgaactcctaacctcaggagatctgcccgcctcggcctcccgaagtgccgggactacaggtgtgacaccacgcccggcctgtttgagtttgactctgtcacccgggctggagtgcagtgatgtgttctcggctcactgcaacttccttctcctgggttcaagcaattctcatgcctcagcctcctgagtaactgggactacaggcacctggctaaatttttttatttttagtagagacagggtttcaccatgttggccaggcttgcctcaaactcctgacctccggtgattccccgtcgcagcctcccaaagtgttgggtttatgggcgtgagccactgcgcccggcctggagggggcttttgagtgaaattggaatgacaaggattattacatcatgtggaaatgtggggacagtggttaaggcagtgagcacagccggtgcaaaggccctggggcaggatcgcgcctggtgtgttggaggaacagtgaggaggcccatgtggctggagcagagtgagctgggggagagagtgaggcaggagagagagggaggagggggagaaaggaaggggagagggaggagggagagggaggaagcagggaggtttcaggccatgcagggcctcctgggggaaggggagggtaaggagagcagaaatggtgtctgaccttcactgaatctggaaaggtcaccggcagccagaggacagttatgaaaatgaaacgaggccgggcgctggggctcacacctgtaatcccagcactttgggaagccaaggcaggcggatcacaaggtcaagagatggagaccaacctggccaacatggtgaagccccgtctctactaaaaatacaaaaattagccgggcgtggtagcacgcacctgtagtcccagctactcgggaggctgaggcaggagaatcctgtgaacccaggaggcggaggttgcagtgagcttagatcgtgccgttgcaccccagcctgggcgacagagcatgactctgtctcaaaaaaaaaaaaagaaaggaaatgacatcgagctgcccgtgttgggcacatgtgaggcctctttccggggctccctcggtgccctcaggcctcaccttagccccggtcaaccctgggcagcagtgaacgaggaagacaaagacgtccccccagcaagggtattgtactacctcccagaggccaggtccaggggccatgatctcttcctggaggccttttaagttgataaaacatcagctaatgtcccttgaaaccagcacagtttctctccagaggtgctgtccactctatgcatctttctcattttttatattttttgtagagatggagtcttgctatttgcacaggctggcctctgtctcctggcctcaagtgatgctcccgcctcagcctctcaaagctgtgggaatacaggtgtgagccaccgcgcctgggcccctgggtagatgctttttttttttttttttgcttttttttttgagacggagtttcgcttttgctgcccaggctggagtgcagtggcacgatctcagctcactgcaacctccacctcccaggttcaagtgattttcctgcctcagcctcccgagtagctgggattacaggcacccgccaccatgcctggctaatttttttatttttatttatttgtttatttattgagatggagtcttgctgtgtcacccaggctggcatgcagtggcacaatctcggctcactgcaacctctgcctcctgggttcaagtgtttctccggcctcagcctcctgagtagctgggattacaggtgcgtgccaccacacccagctaatttttgtatttgtagtagagacagggtttcaccgtgttggtcaggctggtcttgaactcctgaccccgtgatccacctgcctcagcctcccaacgtgctgggattacaggcgtgagccactgaacctggccaatttttgttatttttagtagagatggggtttcgccatgttggccaggctggtctcaaactcctgacctcaggtgatccacctgcttcggcctcccaaagtgccgggattacctgtgtgagccaccgcgcccagacttgggtaattgcttttcagatgctcatgttacagatggtaacatggaggccgagcacaaggggttcagacgtggattggacgaatctgagggccacgccattagccacatactgagtggagtgggcgaaaagggcccaggtttaggtcaccgggataaccagtgtccagagatggacggcacttacctgaggccacagagcaggtgaggatgagccccagcgggagcgagtagccagggagccggcctgcctcctgggctggggagaagacactggaagagcctggagaccgcccagcctccctgattccacgctagacatttaattctttctttttcttttgagacagagtctcgccctgtcacgcaggctggaatgcagtggcgtgatcttggctcactgcagccaccgcctcctgggttcaagtgattctcctgcctcaacctcccgagtagctggaatttgcaggtgcccgccaccatgcttggctaattttttttttttttcagccagtggtgtaaattttcctttaagagatagtaaggtgttttctgtcacccaggccggtgtatagtggcgcaatcatggctcactgcaacctagacctcccaggctcaagcgaccctcccacctcggcctcccaagtagctgggactgctggtatgtgccaccgcgcccggcttatttttgtatttttgtaattttgtagagatagggtttctctttgttgcgcaggctggtctggaactcgtgggctccagcgattctcctgccttggtctcccaaagtagtgggattacaggcgtgagccaccacgccagccacctggtcaaatgaagctttttttttttttttctgagacggagtctggctctgtcgcccaggttggagtgcagtggcacgatctcggctcactgcaagctccgcctcccgggttcacgccactctgctgcctcagcctcccgagtagctgggactacaggtgcccgccaccacgcctggctaattttttgtacttttagtagagatggggtttcaccgtgttagccaggatggtctccatctcctgacctcgtgatccgcccgcctcggcctcccaaagtgctgggattacaggcgtgagccaccgcgcccggccgcaaattaagcatttttaaaagagctgattgatatcaaggaaaacatcaaatagtactggtgcccctcacacccattaggatggctaccattaaaaaaaaaaaagcgtgttttcccagcactttgggaggccgaggcaggtgaatcacttgaggtcaggagttcaagaccagcctgaccaacatggtgaaaccccatctctgctaaaaatacaaaaattagccaggcgtggccgggcgcggtggctcacacctgtaatcccagcgctttgagaggctgaggcgagcggatcacgaggtcaggagatcgagaccatcctggctaacacagtgaaaccccgtctctactaaaaatacaaaaaattagcccagcgtggtggcaggtgcctgtagtcccagctactcgggaggctgaggcaggagaatggcgtgaactcgggaagcagagcttgcagtgagccaagatcgctgcaactgcactccaggctgggtgacagagtgagactccgtctctctaaaaaaaaaaaaaaaaaaaaaaaaagccaggtgtggtagtatgcacctataattccagttactcgagaggctgaggcaggaaaatcacttgaacccaggaggtggaggttgcagtgagccaagatcgtgacactatactccagcctgggtgacagagcaagtctctatctcaaaaaaaaaaaaaagaaatttaaaaatagaattgccataagagccagcattcccactcctgggtatattcccagcaaaacggaaggcatgagctgcatcctgcaaaattccaggtgccttgacttgccccctcagagaaatggggatgagagttcctgctgggtgtatggcagacaccgtgaacagtgtcaccgtgaacagggacacagagatatttgtacacccatgttcacagcagcacaattcacaataaccccaaaggtggaaacaacccaaggggtggtggacagaaaaatggatcaacacactgtggtccatccacacagtggaatattactcagccatgaaaaggaagggaatcctgacgcaggctacagtgcggaggcatcttgaggacctcaggctcagtgagagaagccagacacagagggacaaatgccgtgtgattccactcctaggaagtccctggagtcatcaaattcacagagacagaaagtaggatggggatgccaggggctggggagggagatggggagtgagtgtttcatagactcaaagagtttcagtttgggaagataaagttctggagagggtggaggtgatggttgcacagccacgtgaatgtgtttttaacgctgctgaactgtgcacttagaagtaggtcacgctgggcacagtgactcacgcctgtaatcccagcacttcgggaggccaagacgggtggatcacctgaggtcaggagttcgagaccagcctggccgacatggcgaaaccccgtctctactaagaacacaaaaattagccaggcatggtggcgggcacctgtaatcccagctacttgggaggctgaggcaagaattgcttgaacctgggaggtggaggttgcggtgagctgagatcacgccactgcactccaacctgggtgacagagcgagactgtctcaaaaaaaaaaaagaaaaaaaaaaaagaaaccgggtgcagtggcttatccttgtaatcccggcactttgggaggctgaggcaggcagactgcttgagttcaggagttcaaaaccagcctaagcaacatagcaagaccccatctctacaaaaaataaaagaattcgctggcattgtggctcgagcctgtgtcccagctactcgggaggctgaggtgggaggatcacttgagcccgggaagttgagatttcagtgagctatgattgaaccactgcactccagcctgggcaacaaagcgagaccttgtctcaaaagaataaaatacaaaatggttaagtgtattattttgttatgtgtattttatcactgtttaaaaaaaaaaaaaaaaataagccaggcgtggtggcttacgcctgttatcccattactttgggaggctgaagtgggtgattatctgaggtcaggagtttgagatcagcctggccaatgtggtgaaacctcgtctctactaaaaatacaaaaattagccagtcatggtgacgcacgcctgttgtcccaactactgaggaggctgaagcgggagaatcgcttgaatccaggaggcggaggttgcagtgagccgagatcgcactgctgcactccagcctgagtgacacagcgggactccgtctcaaaaagaaatagataaatagcccctggagcccacagctctggcaaaatccatgaaggtggaaaacatgagctgcatcctgtgaagttctgggtgcctcgacttgcccctctgagaaatggggatgacaggtcctgctgtgtgcacggaggacaccgtgcctggtacgtggcagataaatagtcagtgtcaccctgagctggacgggcctgggggcctgggagggggtccgtgtgctggccggcaaggcagagacgccttgacgccgcatggcgtgggtttgagaccaggcagccggtgagcccagttggctttgggaagctctgaattcctttgagcaccgaagagaaaagaataagctgtgttggcttcgatacccaaatcctccatctgacagccgtgactgctaaatcggctctgcttcccttcctgttttcaagttttagactttctcgattccaaagtgattcacggtcgtcgtgggaagacgagaaaaattcaaaagaagaagaaagaaagaccgggcgcggcggctcacgcctgtaatcccagcactttgggaggccgaggcgggtggatcacgaggtcaggagatcgagaccatcctggctgacacggtgaaaccccgtctctactaaaaatacaaaaaattagccgggcgtggtggcgggcgcctgtagtcccagctactcgggaggctgaggcaggagcatggcgtgaaccccggaggcggaggttgcagtgagccgagattgtgccactgcactccagcctgggcaacagagcgagactccgtctcaaaaaaagaaaaaaaaaaaagaaaaacctaaggaggccaaggaggaggaagaagaacaaaaggcttgcagattccttttttttgtttgtttgttttttgttttgagacggagtctcgctctgtggcccaggctggagtgcggtggctccatctcagctcactgcaagctccgcctcccagttcaagcgattctcctgcctcagcctcctgagtagctgggatcacaggcacccgccaccacgcccagctaatttttgtatttttagtggagacagggttttaccatgttggccaggctcatctcaaactcccgacctcaggtgatctgcccgcctcggcctcccaaagtgctgggattacaggtgtgagtcgccgcgccctgccactcccacgcgctttacttcctcagtaacatccatggcacgggcatcctgcagtgaccgatgcccaccagactgcatccgctaacaagacagggagaccggcctgtggtacccagatgtgcccaagctcacagcctcactattctccgtgctcacagcctcgctattctccaggctcacagcctcgctattctccaggctcacagcctcgctattctccgtgctcacccacccccttagctgtgccacggatgaaattcaggaggcagaatgctgggtttaagtgctcagaagtcagacccgaattcggttgggctcttgttttgggtggaagaaagaggaggaagaggctgaaaaaagtgcatctttggctcataggagtttgtgagtttctcttttgattttgttttcttttgagacagagttttgctcttgttgcccagggtggagtgcgatggtacagtcttggcttactgtagcctggacctccctgggctgaagcgatcctcccacctcagcctcccaagtagctggaaccacaggtgcctgccaccacacccggctaatttttgtattttttgtagagatggagtcttgctatgttacagctcaggctagtgtggaactcccgggctcaagcagtcctcccagctcggcctcccaaagtgctgggattacaggcatgatttttcttttttttttgagacggagtctcgctctgttgcccaggctggagtgcggtggcgcgatcttggctcactgcaaactccgcctcccgggttcaagcaattctcctgcctcagcctcctgagtagctgggactactggcacacaccaccacgcccaactttttgtaatttcagtagggatggggttttgccatgttggccaagatggtctcaatctcttgccctcatgatgtgcctgcctcggcctcccaaggtgctaggattacaggtatgagccaccacacccggccaaattttagacacggggtttcaccatgttggccaggctggtctcgaactcctgacctcaagtgatccacttgccttggcttcccaaagtgctgggattacaggcgtgagccactgcgcccggccaggcgtgatttttaaaattcttattaaggactctcccagaacaccagaggctcacggggctctgagcatcctgcttgagtctccatggagacgaagcctatgtctcctggccgactccaccagccccagtgccacgctgtgcccggccaagcctcagctgagtctaagcacctgcgtctgtgctgggccgagtggcaggatgttgtgggagaacccctgaccccttgcccagctctgctcgtcacccagttctgatgttctgttccatctgggggtggccaggaggctgccagtaacagcaatgatgaatagccattcactgagctaagctcccagacactctgctaagcccacattttagttcatgagtccacaccagaccagggccttcaccatatcctctttttctttttctttttttttttttgagatggcgtctcacttggtcgttcaggctggcgtgcagtggtgcgatctcggctcactgcaacctccacctcccaggttcaggcgattctgcctcagcctcccaagtagctgggattacaggtgcatgccaccacgcccggctaattgtgtatttttagtagagatggggttttgccacgctggccaggatggtctcgaactcctgacctcagatcatctgccagccttggcctccccaagtgctgggattacaggtgtgagtcaccgtgcccggtccctctcctctctctttagtcctgcttggcaaataaggaaactggggctcagctgcctgatgtgtggggagatggtatgggatggtgggaagtgtgtgtgctccagagtctggcttcctgggtttacatcccagctctcttaccgtgtggtcttgcaccagccactggagctctctgggcctcagttccccctctaacgcgggtggacatttcatacaaatggcgtcacacgctgtgtggtcttctgtgtttgacatctttcaccaagcatgatgtgctcaaggtatggcttgggtcagagcctcattttttttttcatggctgagtcgtgttccattggctggatggagcacaaaatgtcctctaaagccaggcatggtggctcacacttgtcatcccagcactttgagaggctgaggcgggaggattgcttgagcccagaagtttgcgtacagcctggacaacatagcaagactccatttctacaaaaaatttaaaaattagccaggcatggtggcatggacatctgtggtcccagctactctggaggctgaggcaggaggatcgcttgagcccaagaggtcaaggctgcagcaagctatgatcatgccactgcactccagcctgggtgacagagcgataccctgccttataaataaataaataaataaaattgtaaattagccaggtgtggtggtgggagcctgtaatcccagctactcaggaggctgaggcatgagaatcacttgaacccaggaggtggaagttgcagtgagccgagattgcaccactgcactccagcctgggcgacagcaagagcctgtctcaaaaaataaataaaataagaattaaaaattaaattttaggctgggcgcagtagctcatgcctgtaatcccagcactttgggaggctgaggtgggcagatcacctaaggtcaggagttcgacaccagcctggccaacatggtgaaacccatctctactaaaaatacaaaaattagccaggtgtggtggcacatgcctgtaatcccagctacactggagactgagacaggagaattgcttgaacccgggaggcagaggttgcagtgagccgagataatgccactgcactccagcctgggtgacacagcgagactctgtctcaataataaataaataaataaataagtacgttaataaaattttacactatttgggtgtggtggggtgcaactgtaatcccagctactcaggtggctgaggcaggagaatcatttgaacctggtaggtggaggttgcagtaagccaagatcacaccattgcacttcagcctgggcgacagagagagactccatctcgaaaaaaataaaaataaaaatgaaaataaaattttaaatgggtgtaactctgtggagggaaaaagaaggctgagaaaggagataatggtgactgagcggttttagataaggtagatggggaaagtgatggggaattaaggaatgagccacacatcatctggggagagcacatcccagacaaagggtacagcccgtgcaaaggccctgaggcaggaccgcacctgacaagtgagaggaacagcgaggaggcctgtgtagctgcagcagtgaggagggggagagagggagcaggggaaggtggggacaaggcagaacaggacacgcagagccttgtgggcctcaagaaggacttgggctttaattatgggacatctttgggaagtgttttttttttttttttttttgagacaagatttcattctgtcgcctagaccagaggcagtggtgcgatcctggttcactgcagctttaatatcccagggatcaaccgatgctcccaccgcagcctccgagtagctgggaccaacggtgcacaccaaccactcctggctgatttttttttttttttttctcaaacagagtttcactcttgttgcccaggctggagtgcaatggcgcaatctcggctcactgcaatctccgcctcccgggttcaagcgattttcctgcctcagcctcctgagtagctgggattacaggcatgcacaaccatgcctggctaatttttgtgtttttagtagagacagagttttctccatgttgatcaggctggtctcgaactcctgatctcaggtgatccacctgcctcagcctcccaaagtgctgggattacaggtgtgagccatcgtgcctggcctgttttcttattttttacagcaatggcgtctcactatgttgctcaggctggtctccaactcctgggctcaagtggtcctcctgactctgcttctcaaagtgctgggattacaggtgtgagccaccacggccagcacgtattattatttttattaatattattgatgagtttcatacgtaaaggatcacgggcactttagagctgggagatacttcagtatttctcctatcctgtcattatcagtgcgagccagtctccctccttgttgatgacattattgatgagttacatacttaaagggccaaggacactttctatgtgtaagcaccctatagaactggaagatacttttaccatttctcctgtgctgtcgtgattagtgggagcactttgtcttgctcttgattaattattattagtgttgttattattaggtgttttttttttttttttttaccaagacggagttttgctcttgttgcccaggctggagtacaatggcacaatcttggctcactgcaacctccgcctcctgggttcaagtgattatcctgcctcagcctcccgagtagctgggattacaggcaccccccgccaccgagcccagctaatttttgtattctttagtagagacggggtttcaccgtgttagccagtctggtctcgaactcctgacctcaagtgatccacccacctcggcctcccaaagtgctgagatgacaggcgtgagccaccgcgcccagccatattattagtgttattaatattattgatgagttacctactttaaggatcacgggcgctttcaacgacaagccccctacattatcccagcaacttttgacattcttccggccgatgccctccgcgggagccggcggggacccctgggaagccggctaaggcccgtcccgcccgcagctccgccctcgcccacccgtaggcggggcccggggccttccggcctcagtttccccccgcggcccggggatgcggggaggcgccggctgccccgcgcggcgcggccgccaggggccgctgcggagccgcctttgtggtcccgatgccggggcgggcgcgggcgggaggagggcgcgggggcccgggagggaggcgggaggcgcggccgccgctccagctgcgagtccgcccgccgcccgccgccgccgccgccggctcggtcccgcgcccgccatggcccgcctgacggagagcgaggcgcgccggcagcagcagcagctcctgcagccgcggccctcgcccgtgggcagcagcgggcccgagccccccggggggcagcccgacggcatgaaggacctggacgccatcaaactcttcgtgggccagatcccgcggcacctggacgagaaggacctcaagccgctcttcgagcagttcggccgcatctacgagctcacggtgctcaaagacccctacacggggatgcacaaaggtgggcgcccggccccctcccccctctccccctccctccgcctcccaccccaccttccggcatcttctctcccccatcaccatccctcctctgctcacctccctcctctgcctgcctctgccggagcatcggttcttaccccctccctcccacccacccctcctcccctctctgggggtgcagctgacagatccgagcgggccccctcccctcctccgccccctctccctccctccccaccttccggcatctcctctctctctccctctctctctccctctctctctccctttctcttctctcccatctccctcgacctctcatccttccccccacagcaccctctctctccctccctccctccctcacccttccatcccccagacccccaccccttcctccctccctcaccccactctttcctgcccgtttgccaggggagcctcgggaacgccggcacccctccctgcccccccacccccattcattcagcctccccaggccccgtcggggaagtttgcacctgcggactccattgctttggttattttcacaaagccaggccggcggggcaggtccggccgcgggggacacggatgcccaggaccccaggctaatcggtaactacaaaggaagacgggttgggggcgcccggctcggggggacgcgcccgcctcgcctgcctcgggtggcggagaggctcccgtcgctgcccaccccctggccccaccacctccgcgtggatcagcattctctcctccatttctctgccctccccctcccccgcctccaccttgggctcaagttgaaactggccgagcctcttagcaatgtgttggggtctcaggcccaagacaatgagcttggacgtgtccatctgggcagagcccaaattctggggtggacagggaggaggagggaggcgtgggcggcctcaggcctgtctgcctccctcccactggattctccctccgatggcatcccgggtgggggtgtccggcaattgtatccccagcccttggttcccatcatgggcccagcgtctgaattggggtggctttgacagccttccggtcaggtgttggggactgggggtgccacttcaaaggccttgtgctggacacccccggccctccccctcccatcctccaggaagaccctggagaggccttggggaaggaccggggcccatgacctattttacacccactttttccccagcgctgcgtgcccggtaagcatgaatgcatgtttattgaatgaatgaattgaatgaatgaatgaatgaatgaatgaatgaatgaaggggttcaagaaggccctagggagggtctggtgagatggggcccaggcctgtcacttcagctagaccctccagctggttatcttgagggaggaaagaaacccctccccattccccatctcttttcaaaaccaaccatcacacacacacacacacacacacacacacacacacaaaattgggcctgaaaaatctaactcctccatgtggcctaggagggcagaggggctcccatgcggcccccataagtcaatatctggagtccagaggtgataggtgggcttttcccacacgcccccacccctgggtacacccaaagcacccatttctagaaagattcccgtgggaatgggggagtccacatggccccccaaacggttgcattgaaaggccgctggttgagctctaggtcggagagacaggtgggggtgcagggactggagcatcctggtgactcttcttcatctttttttttttttccttcttatttttaaatctctgggaaacctgggcacgggagaagtgaggggtgaaggaggggctggggctgggttttcacctggccctgagcctcagtttccctgctgtcaacagagcaggaccatgacgcatccccagttctttttttacaggttggagaatgttggggtccctggggtacctcgggggtatttcccatttgcgggctttccttggagggtgagaattgagaagccgtgtgcacgacagccggcaatcaccctccactttttaggggtcccaggtccgtctgtgtgtgagatacaggggcttcacctcgtgtcgaaaatgggtccagtaccctcggggaagtgaatccccacctgcgtggggcctggctggacttcacctggtctttgcctgcaggtgcttggcacgaaggggtgggggggtgtcttcagaatcagcatctgtgatccaggtttgcgtttggggctcagctgtgtgacttctggctagtgactgcccctctctgggccctctctgggccttggctgaagggaggtggaatggtgaatgggaagtcaggatttttggggagaggagtgagttcagacacctgccaccaacatgaccttattagggctgtttctgggagccctggcgtggtttagtgtgcctgttcagagtggcagggccttggggatatggaccccaggcctggagagaaatccctttccctggatgcccggcggggcccatgagactgggcacaggagatctgtaaggagtagagtggggtgggatgagaacaccctggaggtgcacccggctcctggtacaagcccggagggggtcagctggtaccacctctagcccttccttggtgtccaggctgcagggacttgtttgatttccccatggaacccatcgccatggaggtgggctccgagtgacagcgcatttctgggaaactgagggcttgagagacataccctgggtcccacatttaccggagctaggcccccattaccccccctgccttcctcccaggccaggagaagcagctgtgcctgtatctgtgtgacataggggtgacaggttccccaaagccaagagtgaggcccccagagatggtgctggggatggaggggcccgtgacacctgacagccacagctggcctggccgaaggtggcgtgggggcagccagattcctagaggccgtgctgagactcagagaaaggcaggaggcctcatccaggagcggggcaggggtagggggagagggatgcgtcgaggtggtcttccgaaagagggcaggccctggggcgctgggtttgtttttaagagagagagagagagagagatgaggacacagagagagagagagagacacgcagggaaagagagacagagagacccacagagagacagagacagagaaacacagacagggagggggctgcagagagatgcaggcccacaggaagaccacaagcctgctcctgccagaactccgcatccagagagcggggacctcccccaggaaggacccccaccccaggccaggggctcaggccaagaactggaggctgggattggggctcccgctggcccccctgcagttcctgccccggggaccctccctccaaggcaggcacctctggagctgtggctgcccctgtctatggatggtggctgcctgggtgcccaccctgccaggggaaggtgcccacggtggtactggtccgccgctgccactgggccccccgtttatggtaatcgcatatacatttgcatgttaatgacaatatttgtcttaaagcggaggttgcgctgggggacggtgcaggtggggggggggcccggcgggggcccgggtgggggcccgcggtttccatgggagcaccagctgccggctcgactcgggagggggggaggaggaggctgtagcaggctgagctctgaggcgtgagattccgcgtgtgacgcaccagctccagggagaaggcgggctgggcggcctggcggggggaccgcgggagcagttggcacccctggtggtggcggggacagcggcagggggctgggggtggctggcagggttggccggcgtgtgtgtgtgtgtgtgtgtgtgtgtgtgtgtgtgtgtgtacgcgggcgcgcgcctgggaaggactcctgccggggtgctgtgtggcttcaagctgagcgcgcccctctctgtgcctcgttttcccctgctgcatattctctcctttatttaacagactttcataaggccccggagcctcacacctgtgactgtgacatcgtttctgcacctccctccccccgccccccgcttcaggcaaagagcatttattgaacgcctactgttttccagcatttatgcagagctgggcatttggtgtgaacagaattccttgtaggattcatgatggagtgggctagatgttaatccgtccacctgtatgaccaacatttattgagagcttgctgtgtaccaggccctgttctagaccctgggctactgggttgggcaaaacaaataaaatctgccatccctaccccccatccagacctcccctcccaccagattccagtttaggggacggagacagctggggaactgggcttacaaggcaccgagctcaggaatatgatggcaaaacacacaccagcagtgacagcccagaggggggccctgcccccgcaggagtggaggccaggagggccgcctggaggaggcagttagtgtaggagagtcgttgagagcttggagatgagatgagtctggtttccctgcgtcttgtggccttgggcagatgtcttcatccctccaggctgcagtgggtcttcccgtttcagaggaaatgagggaggtgagagcagaagtggcagggagagcagagaacagaagaggctgttggcatggggccgggcacagagtatgtgcttggtcagtgggagcgggcttgttacatgactacgctgaggcccgaagcgtgaggaggatgcactgacggggaaaggtgttcctgacaatgtgcgagggcccagaggggcgctaactccagggaagctcaggtgcagggaggatggagtttttgccctggtaggaaaggagcagaggggcttgggagctcagggtccccttcttctatggggctcacctgttgaggctcttccgaggggtcttagcttggggctggacccgggaggttatctctgaagtgggcttgtgtctctctctttcacccctcaaattggcaagtgaggccttggccattggaaacacctggtaggaccacactcattcattcattcattcattcattcattcattcattcacacaacacttcttgaaaaccttctgtggccttacctcgtactgagcaagaggggtctgaggccagagctagacattggcacctatagtccagtggtctggcttgggtcagagggaggggtgcagggttgagggaactggataatgaagcaggagctctgcctggaggaggggcattagaaatggggctttgaaggatcgacaggagctttccaggtggagaaagcattttatttatgcattcacagaaacacttactgtgttccaggccctatgatgggcatgaaacacagcagtgaacaagataggtacatgtcttgacttcctggatatagggagagggaactggatctatgaaggcctggaggcatgaagaatttgcacagctagggtagaggacggattaggtgaggcgtgggagatgaggctggagagtcagcatgggctggaccaggaaagcctctgatgctggactgagcttggactctttcctgagggcactggggagccatggaagagtttagagcagggaggaactcaggcagacctgcatgggaagcgggcttcacatcctgttaactcccattgccaccaccagcctcttcccagcctcccagccttgctcaaaatatgctcgtttccttcacacctggatggacaaaatagaagcttccagttggggtgaggcccacagtgtgggaagagagaaatacaaagaagcagatgtgtgttccgattacattggctcttagagaaccaagttcccctcctccatgtgaagcacaggaggagatcggagcccagagaggggcaacacccagcccaagtcatacagcagtacagctgggcttcacgcctcccagcctgagctttgacccgctctggaaggataaaaagaaacatgattttggaaacatagaccagggtcagagccatccagggaggctggctgtccttgaacttaagatgatcagggccaaagggaagggctgttaggtttggaagacactggcctagcaggagtccagttggtctggagtcatagtcaacatcagtgatatgtaagctctaggagggcagaaattgtgtcttgtttgccatttggaagtgagcttgtggatgaacaagggcatgaggaaatgagacgatctggggattggagaatggatgggctggctaacagatggatggagagatagatatgtgaatcaatggatacagacatggatggatggatgaatgggtgacagtgactctagatatgagtggatttgatggatagaaaagtgggtagatcagtggaaggtttgaatggattgatggatgggtgaacggatggatggatggatggatggatggatggatggatggatggatgggtggatgaatggatttatggatggatgggtggatgagtagtggatggatggatttgtagatgggtgggtggatggatggatggatttgtagatgggtgggtggatggatggatggatggatagatggatggatggtagatgggtggatggatggatggatggattggtgggtgaatggatgagcaggtgggtggatggatggatggatgggcggatgaatagattggtggatgatgggggagcgatggatgggcatatggatgggtgggtgggtgggttggtgggtcaatgagtgcatggatggatggatgggtaggtgggtggatagatgagtggatggatggatggatggatgcatgaatgaatgagtgaatgagtgaatgaatagatggatggatgatgggtagatggagaaattaatggttggatggatggatgaaaagatggatgggtaattggtggatggaatactagatagatgggtgggtgcatggatgaatggatggatggatgatggatagaagatgggatagactgaaggatggaaggatgcttcctcaacctttactaccttcctcctcacctggtgaatacgaatgttcagaacctttgctctcagacaggcttggttccaatcctggctccatttttaaatttctgtgtaatcctgaaaaagtcacctcatcttttctgaaccttagctactttgtaaaagagaagtaatacaggtagctagttcacagagcagttgtcaaaattggaactaatttatatgatgtggccaggcgtggtagctcacacctgtaatcccattgctttgggaggttgaggtgggaggatcccttgagcccaggagttcaagaccagcctgagcaacacagctctacaaaaaataaaaaccatatccaggtgtggtggtgtgcaactgtagtcccagccactcaggaggctgaggagggaggattgcttgatcacaggagttagagattacagtgaactatgatcgcaccactgcatcccagcctgcgtgatagagtgaggccctttacagagtgagtctgtaaagaaaaaaaaaaatgtggtgtgattcatgtaattaacctgaataatgacttgcatattgtaggtgttctccataaatggtcaggcagtcaaaatagtcaacaggctggctgcagtgcatcacgcctgtaatcccagcactttgggaggctgaggtgggaggattgcttgagcccaggagttccagaccagcctgggcaacatagcaagaccccttctctacaaaaaataaatttaggctgggcgtggtggctcacgcctataatcccagcactttgggaggccgaggtgggtggatcaccagaggtcgggagttcgagaccagcctgaccaacatggagaaaccccatctctgctaaaaatacaaaattagccgggtgtggtggtgcatgtctgtaatcccagctactcgggaggctgaggcaagagaatcgcttgaacccgggaggcagaggttgtggtgagctgagatcatgccattgcactccagcctgggcaacaagagtgaaactccgtctcaaaaaaaataaaaattaaaattaaaaataaataaataaataaataaataaataagtttttaaaaaagctgcacgtggtggcatgtgcctagagccctagctgcttgggaggctgaggtgcgaggatggcttgagcctggggaggtggaggctacagtgagccatgattatgccactgcactccaatctggaaaacagatctaaaccctgtctcaaaattcaaaaggcaacaactttattaagtctgtattgtgtgccagccattgagcgaggcttgaggacataaagcaattcagggggtaggagagactgacgataaactaggaaacaaataaagttgagataggtgtgaggtgagctgctgtgaacaaacaaactaaagatgtgtgttgggagatgacagctttccttgggggccagagatggcctttctaggaggtgacgtttgagacgagacctgaatgacagatgggaaggctgttatgctacaaccaagggaaaggcgttccaggaagagtgcagaggccctgaggcaggaccaccacatctggtgtgttggaggaacagcaaggaggcccttgtggctggagcagagtgaggagggggagagagggaggagaagagggcagagagggagtcgcgcaggttgttgagcgggttctgtgtgtcttggaaggactttggtttttaccccaagagaggtggagccatggagacctgtggcaggggagggacagggtctctcaggggaatatggacaatgtggattctgggtcctccattttttagatggggaaactaaggcacagaaggccctagaatgtgtcaggaagttctgccactaggcttatgcctggctcttctgaggagctcctgaagacggcggcgcctggaggtagctggaagacagagtggagcaggcccctcagtgccctcccattctcccagcagcctttgagggtggggtctttatatccaagaggatttgcattcttgtccctgaccctccactagggggaaggaccagagggcatgcctctagcagagctaggagccaccagaagaactttgtacacatagggaaatggaggcccaggtagaggaggggaggtcaattcaccagctcttggcaagggaggcgaggaagaggaagggatctagtgatgtggttcgttctctctctctctctctctccctccctctttcaagagattggcatctcactatgttgctaaggctggtctcaaactcctgggctcaagcaatcttcccgccttggcctcccaaagcattgagatcgtaggtgtgagccaccgcgcccagccatgatgtggttctcaatgggagttattctaggacacttggcaatgtctggagacatttgtggttgtcatgatttgggggtgcttctggctgcgagtggtgtcgagtgggtggaggccaggaatgctgctcaataccccacagcgcccagggtgacagatgatccggccccaagcatccacggtgcagaagctgagaaaccctggtccagggtacaccagtgacctggcttgggcagttggcacacagtgcagtgtcctggggatgaggcctgaaggtacctaggacaaaacctgggaatgcccttgacttccctctctcacaacaacaaccgcacctcctatccctccatcagcagattctgatggctctgccttcaaaacctctccagaatctgcccacttctctctcctctgccttcacctggtccagccccctcatccctcacctggaccagtgcagtccctgtgcccttgtccctggctcccaccttcgcgccccacagtctgtcctccccgcagcagccaccagagagcgcctgtgagcacctgagtcaggacccgtccctcctctgcctgcagccctccgtggctcccacctcccttagagtcaaagctgaagtcctcccgtgacctgcctcatccccttcataccatcccctgccccctctctcctcctcgctccctctgttccagccacactggcctccttgctgtttctgcaacaggcaaggcgtggtcctactccaggacctttgcatgggctgtgccctctgcataaatgttcttcccccagatactcacatagctccttcctttctcttctgtaagcttcacctttttttgtgaaacccctgtgatggcaggatttgtaatctagtcactcccagaactccaagttcctttttcctcctttccttttttttttcctgtgcaaatgaagacctctaacatactatatatatcgcttttaattttatttgctttttctccttcctaatagactgtaagcctcattagcacagagattttcacctttgtgtgtactgctgtgtcaccagtgcctaaaagagtgctttgaacatcacgcgaggatagatgggtgggtgggtggatggatggatggatgaataggtgggtgggtggatgggtggatgagtggatgggtggatggatgtgtggatgggtgggtggatggatgaatgaatggatgggtggatgaataggtgggtgggtggatgggtggatgagtggatggatggatggatggatggatggatggatgtgtggatgggtggatggatggatggatggatggatgtgtggatgggtggatggatggatggatggatggatggatgtgtggatgggtggatagatggatggatggatgaatggatggatggatggatggatggatgtgtggatggatggatggatggatgaatgaatggatggatggatgaataggtgggaggatggttgattggatgatggacaagtggatgggtggacagttgggtgggtgtatggatggggaaatttctggtgtagtgatggggactgaagccgtaggagtcaagatgcctgggcgagagatctggggtctagaatgagcctcaaggaacccccatatgtcaggctgtggagaggagcaggcagcatggaggctgaggagccacagccagcagggctggacctcatttggaggcagcatggttgacatagggtccaggaggaggacaccagggcctcagcacaggaatcaaggcatttatgcgtgcattgagggacagtaaaaagggggcagagagcccgtctgtctcggttttcctagtgaagttggggagaactttgggctaggaaggtggaggaggaagtggagaggatgagcagcaaagctgagtaggtggagaagggagggtcctgtgtccttttcagtgcatgtgtggcctcgtggttcccatttggtggatgagactgtgaaggctcagagaggttaagtggctggcccaagagcacacagcagaaaggtactgagctggctttgatccttatctccaatcactagattacagaactgagttaaagactaagaacttggagacccctgccatgcagggggttcgggatcaaaggggttgagatgggaggggggttcctggctggggagagaagaagaggatgaacagcaatgtattccctgtctctgtttccccaccaccatcggtgcatcgtaggtgctcaggaatattgaatgactctgagctaggcatggcagggaggggaaggacaaaaatgaatctaggccaggcgcgatggctcacgcctacaatcccagcactttgggaggccgaggtgggtgatcacctgaggccaggagtttgagaccagcctggccaacatggtgaaaccccatctctactaaaaatacaaaaaactagctgggtgtggtggcgggcctgcacctgtaataccagctacttgggaggccgaagtggaagaatcgcttgaacccgggaggcggagattgcagtgagctgagatcgcgccactgcactccagcctggacgacagagcaagactccatctcaaaaaaaaaaaaaaaagtaaagtaataaagaatggctactccggccaggcgtggtggctcacgcctgtaatcccagcactttgggaggccgagacgggtggatcacgaggtcaggagatcgagaccatcctggctaacacggtgaaaccccatctctactaaaaatacaaaaaattagccgggcatggtggcaggaacctgtagtcccagctactcgggaggctgaggcaggagaatggcgtgaacctgggaggtggagcttgcagtgagccgagatcacgccactgcactccagcctgagtgacagagcacgactccgtctcaaaaaaaaaaaaaaaaaaaaaaaaaggaaagtaataaagaatagctactgcatagagcagccgcctgggctgcttgttggcagtttttatggttactccttgaccatatgctaaacaagaggtggattattcatgagtttcccgggaaaggggtgggcagttcctggagctgaagggtcctccacttttaggataatttgcagacgttgccatggcgtttgtaaactgtcgtggcgcgggtgggagtgtctcttagcatgctaatgcattataattagcatgtaatgagcagtgaggatgaccagaggtcactttcacccccatcttggtttgagtgggttttggcagcttatttaccacatcctgttttataagcagggtctttatgacctgtatcttttgataccgttctgccaacctcctatctcatctcgtgattaagaatatctaacttgaggccggacgcggtggctcacgcctgtaatcccagcactttgggaggccgaggcgggtggatcacgaggtcaggagatcgagaccatcctggctaatacagtgaaaccccgtctctactaaaaaatacaaaaattagccgggcctggtggcgggcgcctatagtcccagctactcgggaggctgaggcaggagaatggcgtgaacccaggaggcggagcttgcagtgagccgagatcacgccactgcactccagcctgggtgaaagagagaggctctgtctcaaaaaaaagagaatatctaacttggccgggcgccatgggtcacgcctgtaatcccagcactttgggaggccaaggcagatggatcatttgaggtcaggagttcaagacccagcctggccaacatggcgaaaccccctctctactaaaaataaaaaattagctgggcagtagtggcaagagttgtaatcccagttaccaagctcctattcaagatggagttgctctggttcaaacgcttctgacagtacttccctctgatatcccccaaaccctgagatcccgcagggcccaaaccagggttcatgtctttcttccaaagtgcacctcctcctgggttcctacctgggtttgttgtcccagggcttttgtaacaaatgaccacaaactggggggcttggaacagcctctcccagtcctggaggccagaaatcagctatcaaggtgtgggtagggcctcactttctccaaggggagggtccttcctgcctcttcagcttctggggactccgggtgtccttggctgatggatgcatcactgtggtctctgctccatcatctgtgcgtctgcgtctcctctcctctgtgttataaggacacttgaggccgggtgtggtggctcacgcctgtaatcccagcactttgggagaccgaggcaggtggttcacttgaggtcaggagttcgagaccaacctggccaacatgacgaaaccctgtctctactaaaaatacaaaattagcagggtgtggcggcgggtgcctgtaatcccagtactcaggaggctgaagcagaattgcttgaacacagtaggtggaggttgcagtgagccaagatcacaccattgcactctagcctgggcaacaaagcgagactccatctcaaaataaaaataaaaaataaaaattaaggatgcttgtccttgtgtttggggcctgccttcatctagcttgacttcatcccaaattccttattgaaatctgcaaagtctctttttccaaatcaggtcacatttcaggttccagagtggctatatcttttttaaaattttataaaattaattttaatttttttgagacagggtctcactttgtcacccagactggagtgcagtggtatgatcatagcttgctgcagcctcgacctcccaggctcaagggatcctcccgcctcagcccgtttagtagctggaactacaggtgtgaaccaccacacccagctgtttgttttttttttattagagacaaagtctcactacattgcccaggctggtgcaaactcctgagctcaagcaatcctcccgcctcagcctcccaagtagctgggactgcaagtgtgtgccaccatgcccggctaattgtttttaatttttactggagatggggtctcactgtgttgcccaggctcgtctcaaactcctgggctcaagccatcctcccacttcagcctcccgagtacctgggactacagatgtgagccatcatgcccggctaactttttttttttttcagtagagttggggtctcactatgttgcccaggctcaggatggatgtagctctttttcagggagccaccattcaacccattacatcctcacaccctaccatccaagtgcatcccagccatccttgcctcctccctcccctcccctcgtcccccaccaaagccctaccttagattttcctgtctttgtccccatggccctctggggtagtcttcaccttctcccatactgaccttgactctgccccctcactggcctccagtcttctgtcctgcactccagtcccttcttcgtgctggccccaggaggctctttcccgcacacacctctgactatgcccaacccctgctcaaacaccttccatggctccccactgcccttgacatcagtccagcagttctttgcctgtttcaccctcatctgtcccctccaatggcatcccccatctcctgcaacacacttttttttttttttttgaggcaagagttttgctctgttgctcaggctggagcgcagtggcgagatctcggctcactgcaaactttacctcccaagttcaagtgattctcctgcctcagcctcctgagtagctgagtagctggaattataggtgcacgccaccacacctagccaatttttgtatttttagtagagacggggtttcatcatgttggccagactggtcttgaactccttacctcaaatgatccgcctgcctctgcctcccaaagtgctggtattacaggcatgagccactgcacctggcccttctttttctttctttctttttttttgagatggggtctcactctgtcatccaggctggaatgcagtggcataatctcaactcactgcaacctctgcctcccgggttcaagagtcattcttgtgcctcagcctcctacgtagctgggactacaagcatgaaccaccacacccagctagtttttgtatttttagtagagagggggtttcaccgtgttggccaggctggtcttgaactcctgaccttaggtgagccacctgcctcggcctcccagagtgctgggattacagacgtgagccactgcgcccggccctaccacacacttctgaaagcctatgttccacacaccaggcaggctcttgttctatggccccagctccaagaatcatccttcaggaagccgtctccaagcagaaccaggttgccttcagagcgtccccagccctgcctttctcttggcccgggctgaccacacagggtgtggaggggacaggagtgtcaggctctgcctcctcctagcaggaggatcacagagaatcacttcccaaaaaagagcattttcctgggctggagactggagtgtccttttgggctgaggtccccagctgcccgggctggagaaacttatccattgagcagatctcatgttccccaaggatcccccaccttgatccccaatgtacccttggtacccttgggtctcgagagatttgtgtgcagtgcattgtctatgaacttgaagatcagttctttttttttttttttgaggcggagtcttgctctgtcaccaggctggagcgcagtggcaccatcttggctcactgcacccaccaactccctggttcaagcagttcttctgcctcaggctcccaagtagctgggattacaggcacgaaccaccacgcacaagccaccgcgcccagctaattttttttttttgtatttttactagagatggggtttcaccatgttggccagcatagtctctatctcctgaccttgtgatccacccgcctctgcctcccaaagtgctgggattacaggtgtgagccaccgcgcccggcctaaagatcagttcttgtccaggctttgaaaatagggtgggtgcagattgccaatcactgagcattctgaaccattgatcccaggtgggacttccctgtctaccccctccagaaccccaaggctctccaggtgtgcagcaaggctgcacacctgcctctggtgcccttgccatctggggcaggtgtgtggggtgggagtggctggggctgggacacggtgagaggctcacctggcgtgggtgggggataagctgtggctcaggctgaggcttccttcaggggatccctctgggtctaggatgcaaccaaccagagctctcacagttgaaatgggatccacagggccctcagcatttgatccagccccgtgtttctgacaaaggtggcactagtttgttgttgttgtgtgtttgtttgagacagagtctccctcttgcccaggctggagtgcagtggcgcgacctcggctcactgcaaccttatctcccgggttcgagcaattctcctgcctcaacctcccgtgtagctgggaccagaggcgcgcgccgccacgcccagctaatttttgtgtttttagtagagatggggtttcaccgtgttgggcaggctggtctcaaactcctgacctcaggttatccacctgccttggcctcgcaaaatgctaggattacaggcatgaaccaccatgcccggcccaaggtggcactattttaaggttatttctagggaagcaggtacggcaagaggctgtgttcttcctcatattccttgggggagaattttggaaaagatgcgaaagccaggcagtggatctcagctgttagtgcatggtctgcagagctagactacctagatttaagccctcgacatttggccgggcacgatggctcgcacctgtaatcccagtgctttgggaggctgaggcgggcagattacttgaggtcaggagttcaagactagcccggccaacatggtgagaccccgtctctactaaaaaatacaaaaaattggctgggtgcagtgactcatgcctgtaatcccagtactttgggaggctgaggtgggcggatcacttgaggtcagcagttcaagaccagcctggccaacatggtgaaaccctgtctctactaaaaatacaaaaaaatggccgggcgcagtgactcacacctgcaatcccagcactttgggaggctgaggtgggtggatcataaggtcgggagttcaagatcagcctggccgagatggtgaaaatcctgtctctactaaaaatacaaaaattagacagtcatagtggcaggcgcctgtaatcccagctacttgggaggctgaggcaggagaatcgcttgaacttgggaggcagaggttacagtgagccgagattgtgccattgcactccagcctgggcaacagagcaagactctatctaaaaaaaaaattagctgggcttggtggcaggtacctgtaatcccagctactcaggaggctgatgaaagagagtcatttgaacctgggaggtggaggttgcagtgaggtgagatggtgctgctgcacttcagcctgagcaacagagcgagactccatctcaaataataataataataataataataaagcctggacattctacttaccacctgtgtgaccttgggcaagccacttcccctctctgtgcccccatctctcatctgtaaaatgggaacaatgccagcagctactgcataggggctactatgagtattaaatgattcagtatagagtataagcttattcttttctttttcagttttttctttttttctttggtttttaatttttttgttttggggtatttgtgtatgtgtgtgttttttaatttttttctgagtataagcttattaacattaaatatcaatggagtttttttgagacaaggttttgctatgtcgcaaaaccttggctggagccaggctggaacacagtggcacaatcatgcctcactgcagcatcgacggcccaggctcaagcgattctcctgtcttgacctcctgagtagctgggaccacaggcacatgccacaacacccagctaatttttaaaattatttgcagagatggaatttgactacgttgcctaggctggtctcgaactcctgggctcaagcaatccttctgcctcggcctctgaaggtgccgggattccaggtgtatgccaccacacctggcccagtggactttattaacatcactgcacgtctgtgctgatggggaactgtacgagtttgcaggcgctgccgtaaccacacaccacagacacggtggcttaaacaacagaaatttatttttgctcagttctggaggccagaagttcgaaatcaaggtgttggcagggctggttccttctgaggctgtgagggagcgtttattccaggccgttcccctgtagcgttccttgtcttgtaaaggcatcgtcccatctccgcctgcatcttcacgtccccctgcctgtgcgtgtctctgtgtctatttttccattttttataagggcaccagtcttattggatcagggcccaccctgatgacctcatgttgactaattccatctgcaatgaccccgtttccaaataaagtcacattcggaggtcctggggattaggactgcaaatgatgaatttggagagggggagaagcacattcagcccataacaggaactgtgaatcaaagctctatttatccaggggtgggtaaacattacgcattttcaccagctagaaacgacaagcaaagaggccaagaagaggttgggccaagagatcacggaagccataaggaagattttcagcaccagggacagcgtcagggcgggcttttgtgagcatgcgtctgtgtgtggcgtgtgcatgggcctgtgcgtgcgagtgtgtgtgtgtatggtatgcatgcagtatgtgtgtgtgcgtagtgtatatggtgtgcatgcattattgcattgtgtgtgtagtgtgtggtgtgtgcatctgtatgtgtgtagtgtgtgtggtgtgcatgcattgtgtgtatgtgtgtgtagtgtgtggtgtgtgcatgcatctctgtgtgtagtgtgtggtgtgtgcatgcatctgtgtgtgcggtgtgcatgcatctgtgtggtgtgcatgcgtcttgtctgcgtgtgtgtgtagtgtgttttgcatgcattgcgtgtgatgtgtgtggtatgtgcatgcatctatgtgtggtgcacatgtgtcttgtctgcgtgtgtgtgcgtgtgtggtgtgtgtatgtatctgtgtgcatagtgtgtgttgtgcatgcatcgtgtgtgtagtgtgtggtgtgtatgcatctgtgcatgtgtgtgtggtgtgttgtgcgtgccttgtgtgtagtgtgtggtgtgtgcatgcatctatgcgtgtgtgtatggtatttgcatgcgtcttgtctggtatatgtgtgcgtatgtggtgtgtgtatgcatctgtgcatgtgtgtgtgtagtgtgtggtgtgtgtatgtgtcttgtctgcatatatgtgtgtgtggtgtgtgcatacatctgtacgtgtgtgtgtggtgtgtggtgtgtgcatgcatcttgtctgcgtgtgtgtgtgcatgtgtggtgtgtatatgcatctgtgcgtgtgtgtgtagtgtgtggtgtgtgcatgcatcttgtccacgtgtgcgtatgtgttgtgtgtgtatgcatctgtgtgtgtgtagcgtttggtgtgtgcatgcacctgtgcatgtgtgtgtgtagtgtgtggtgtgtgcgtgcatctctgtgtgtgttgtgcatgtgtctttgcgtgtgtgtgtggtgtgtgtttgcatctgtgcatgtgtgggtgtgtgatgtgtatatgcatctgtgcgtgtgtatgtggtgtgtgtatgcatctctgtgtgtgtgcgtgtgtgtttgcatctgtgtgtgtgtggtgtgtgtatgcatctgtgtgtgtgcgtgtgtttgtgtgcatgcatctgtgtgtgtgtgcgtgtgtgtgtatgcatctgtgtgtgtgtgcgtgtgtgtgtggtgtgtggtgtgtgtgtgtgtggtgtttctttccctttcactgcagagctcccagaccctggggctgatggccttaaatgttgctcagggcacctacccactccctagcctcctagggccaccaccctccaaaccctgcagacaaggagtccacaggcaaaaaaaaaaaaaaggaacctaggaagaaggttttttacccttattttacatctgcctgcagcccaatttcttgccgatcaaacctgatttctctcaggccttagggctcgttgtcttagtgtagttcttttgaagagcttggggaataaaattcggaaaacaaacatcaagaatagaccatcacatacaacaacggcaacaggaaagatgagcacatagactctgtgaagagctcccccaaagtgacaaggtgcccagcttcattaatagttcttggaaggtgcattaaaatctcaatgaaatacaactgcacgcccaccttaatgactaacatttaaaaggttggcaaaaaccaagcattagtgaagatgaagcactaatagagcccgacataggcacaacccacttcagaaaacgatttgaaggaatcgatgaaagttaaacacacgcctgtcttatgcccagcacgtccctcctgggtatgctttttgcattaaaatatacggacaaggccgggtgcggtggcttacgcctataatcccagcaatttgggaggccacggcgggtggatcacttgagatcaggagattgagaccagcctggccaacatggtgaaaccctgtctctattaaaaatacaaaagttagccgggcatggtggcggacacctgtaatcccagctacttgggaggctgagacaggagaatcgcttgaacccaggaggggaaggttgcagtgagctgagattgcgccactgcactccagcctgggcgatagattgagactcagtctctctctctctctctctctggctctctctctctctcatatgtatatatatatatggacaaggctgggtgcagtggcttatgcctataatcccagcactttgggaagccaaggcaggaggatcacttgagcccaagagttcaggaccagcctgagcaacatagcaagaccccatctctaataataatagtaataataataataacagctgggtgtggtggcatgcaactgtggtcccagctacttgggaggctgaggccagaggatcacttgagcctgagaggtggaagctgcagtgagctgtgatcacaccactgcactccagcctgggcaacagagcaagaccctgtctcaaaaaaacaaaaattggacaagactgttgcagagcaactttattcataattgccccaaatagcaaacatcccaatgcccacccatgggagaatggataagcaatttttagtgtattcataggacacaatactacccagaaacaaaaaggaactcccccatgatgcacacaaccacatgctgttgactatatattgaatgaaagaagccagacacaagggcggacctatgctatgatttcgtttatataagtccaaaaacaggaagcactcaatcacattgatacgtgatgcgcacatggtggggacaccatcgtgaaggcatacacgagagctggggtggttacccctgcaggatggagggggttgtgctggggtgggggacactaggacttctggtggcttcatggtggctgccactttttacttttgttgttgagacagtctgactgtgtcacccaggctggagtgcagtggcacaatcacagctcactgcaacctccacaccctgggctcaagcgatcctcctgccttggcctcccgagtagctgggactacaggcccctgccaccacgcccgactaattttttgtatttttagtagagatagggtttcaccgtgttagccaggatggtctcgatctcctgacctcgtgatccacctgccttggcctcccaaagtgctgggattacaggcgtgagccatcacgcccggcctaatttttgtattttttatagagatgggttttcgccatgttgcccaggctggtcttgaaattgtgaactcaagtgatcctcccgcctcagcctcccaaagtgctgggattacaggcatgagccactgcgcccggtctctctttctatgtctcgacccaagacatagtgtgacatagttgtcttgggtcgagacatagagatggttgtatggatttataatcatttgttacattgcacgcttacgtgttctgcacttttcagaggggtacattggtaatatatcccaattacaatgtttattgtggtgatatatgcataatatgaaatgtaccgttaaaaaatttttttttaattgagaaagcactttgctctgttgcccaggctggagtgcagtggcgtgatcttggctcattgcaaactctgccgcccgggttcaaacgattctcatgactcagcctcccgagtagctagaatagcaggttcccaccaccacacctggctaattttttttgtatttttagtaaagatggagtttcgccttttgggccaggctggtcttgaactcctgacctcagatgatccaccggcctctgcctcccaaagtgctgggattacaggtgtgcaccaccgcacccggcccatcttaaccatttttaagcatagagttcagtggcattaagtacattcatattgttctgcaatcatcaccactatctgatcttcagaacttttattttactttattttagagacagggtctcactctgttgcctaggctggattgcagtggtgctatcatagctcactgcagcctccagctcctgggctcaagtgatcctcccaccttggcctcctaaagtgctgggatgacaggcgagagtcaccttgcctggcctccagaacgttctcatcttcccaaactgaaactgtatccctgtgaaacactcactccccatccccctccccagcccctggcaccccccatcctgatttccatctctgtgaatctgatggctctgtggtcctcctatgaaacctctgtctgtcgttttgtgtctggcttatttcaccgagcatggtgttctcaaggttcacccacgttgtgtcaggtatcagaatttccttcctttttgtggctggataatattccactgtgtgggtcgaccgtattgtatcgatcccttcatctgtgaatggacgcctgggttgcttccgccttccggccactgtgaatcttactgctgtcaacattgttatacaaatatctctgttcgagtccctgctttcaattcttctgaatatacacccagacgtggaattgctggcttccgtggtaattttgtgtttcgtttctggaggaactgtcaaactgttttctgcagcagccgtaccattttacattcctactacaaacttttttctttctttcttccttccttccttccttccttccttccttccttccttccttccttccttcctttctttctttctttctttcttttcttttcttttcttttctttcttttcttaatgctggaaactgttgtcagctctgcctggtacccccagggttccagggggctttttggacctggggtgggttccctcggattccctaccccctccccaccacacagcccagctggcgggagcgaccagcaggtggccactttaattagctcctgcctggagaagtggacaccgtggagctccgtacagcgtgtccctgggagaccagggaccatagggggcggggtttgagggggaaccgagggtttgacaacatcggagcagcccacgatggtctcatttcacaggtccccagacaggaccactcagtcccctgtatccatcccaggacccctgacctcctgtgtgcaatccctaccccaccttggggaaacgtctttcaaaatacttttgatctaattaggctttcagggcgagggcgggttctcttgacttgcttgtctcctgtctctgtctctgtcaacgtctctggtctcccacccctaacgtcgcccaatcacagcctcactctgggccaccagagggctggccccgcccctcgcttcccaccctccgatccctaatgttgcccaatcacagcctcactctgggccactctatgggctggccccgccccttgcctcccatccctaatgtcatccaatcccagcctcactctgggccactccggggctggccccgcccctcacctctcctgattggtcctgatttctgccaccatgccacaccctctcaagctccacccccatccattggctggtccaacttgtggtcctctcagaccatcccctctccctctgataggggaaggtgaggcccagagagggggagcgcatgatccaaggctacactgctggtcagtggcagagcccactgctccctatcccagggccaggccttcttccatctttctgggaccactagtgccctccccatcctccccgctgggcagcccctctgcccactcccctcaccccaccttgtccagggctctcagcatctcttttctgagctcagccactgactttgttaatggctggacctcctctccctcttcctggtctcaccctttgcgggggtgtatgtgtgtgcaggggtggaacgggtggaaaacactgagccacttcgactgtcccctcccaaaacatggtggcttcagcatcctcttctctttttattttttgagattgtaataagatatacacaacttcaaatgtaccgtcttaaccattttaaatgcatggttcaggccgggtgcggtggctcacgcctgtaatcccagcacttcgggaggccgaggcgggcagatcacgaggtcaggagatcgagaccatcctggctaacacggtgaaaccccgcctctactaaaaatacaaaaaaattagccaagcatggtggcgggcgcctgtagtcccagctactcgggaggctgaggcaggagaatgacgtgaacccgggaggcagagcttgcagtgagccgagatcgcgccactgcactccagcctgggtgacagagccagactccgtctcaaaataaataaataaaaataaaaattgcacagctcagtggtattaagcatattcacacggttgtgcaaccatcaccaccatcatctccagaactttctcatcttcccaaactgaaactctgtccccatgatacactcagtcctcattcccctccccagcccctggcacctccccattttactttctgtctgtgtgaatctgatgactctagggacctcctaggagtggaatcacacaggatttgtccttctgtgtctggcttatttcactgagagtgacattctcaaggtgcatccatgttgcagcctgtgtcagaatttccttccttttcttggctgaataatattccgttgcgtggatgcaccaggttgtgtagatctatgcatctgtggatggaagcttgggttgcttccacctagtggccactgtgggtggtgctgctgtgaccatgggtgtgcccgtgctctcttaacacccccgtttctctcccttccaggctgtgccttcctcacctactgtgccagggattccgccatcaaagctcagactgccctgcacgagcagaagaccttgcccggagtgagtcctgtgtggtgtctggggaggaggggacaggggatggctctcagcctggggtgggagccaaggctcttcctgagattggctgtgaattctgtgtgtctcgggactcagaaagaggtatgaggagcagaggtatagaaatcatcataatagtgtgcatttattgagtgcctactgtgtgccgtgctctatatttcataccagagtggttgtgtgtggttgtgcaggttgtatactgcacaagggcacctggcccagtgtgtcgttgtctttgggttgagacctgaaggataaggaagcattagcaggcagagggcacagcatgtgccaaggcccgggggaggaccatgcctgacgtgttggaggaacagggaggaggcccgtgtggctggaacagagtgaggaggtggagaaagaaaggcgggaagggcaggggaggtgacagggctggttgctgaaggctgtgtggaccatggggagaagcatagaccatgcttgcttctcactataaaaaggaaaatgattttcctcgcttgtctttatggtgcaaacggagccacagttccttaacacaagggcttcttttttttttttttttttttttgttgttgttgttgttgttgagatggagtctcgctttgtcacccacgctggagtgcagtgtcatgatctcggttcactgcaacctccgcctcccaggttcaagtgattctcctgcctcagcctcccaagtagctgggattacaggcgtgcaccaccatgcctggctaatttttgtatttttagtagagacggggttttgccatattggccaggctggtctcaaactcttgacctcaagtgatctgcacacctcggcctcccaaagtgctgggattataggtgcgagccaccaggcccggccaacacaggggcttcttcatcacaatttctgtctgcagaggaggctggcctgggtgctgtctctgatgagtctctccttatttttattttttgagacagggtcttgctctgttacccaggctggagtacaatggctcactgcagcctccacctcctggggtcaagtgatcctcctacctcggcctcctgagtagctgggactataggtgcatgccatcacacgtggctaattttttaatttttgtagagacggggtctcattatattgcccgggctgatcctgaactcctggctcaagcgttcctcctgcttcggcctcccaaagtgctgggattacaggtgtgagccagcacacccagcctgatgagtctctcctggtcagctttgtcctctttgggtgggcaggaggcccctgcccccagtgaaggatgagtggtctccctgagccagtcaatccgggtccccaggccatgcctcttgatggagactgaaggaaccacagtgagccacggcgccccaccttgtgagctctggggcagggagctcacccttccctccggaattctcagggacctttcagcctccagggacatcagggcattcgtagccttcgtgcttggctgactgtaggaaatctgacgtgcgccttccagggacccgaggtcatggcatgagtttgacttgattctccatgagcattggaaggttctgggcctgggggtggcctctgcttggtcttgaagaatagagagcccctcttttgggtgtgatgtgatgcaagttagagtgtggggtctggcagccacatctgtgggctcgttgctcagctccatccttgctgtgtgacagtaagccagtgacttaacctctctgatcttcagcactggaagagaataacagggcagggtgggctagcaatctatagagaaggtgctcagtggagggcttcactgaggatgtgacatttgagaaaaaacctgaaagatggcatggaagggcactccaggcagaaggaacagcatgtgcaaaagtgatctagagtctgcggtaaattccctgaattcactgttcatcttggaccttctgctggtgcctacccaaaccaaccagaagctaaaaaagtacattaaaaaaaaaaagaaagaaagaaatcccacaaccgaacaaaaaatcaaaccaaccagaagctggagggcaggtcagtccatacagattagtgcccaggggcacagcagagttctagggaccatattagttatttattgctgcataacaaattatccccaaaataaagacttcaaacaataagcacttgttatttcacagctaccaggggtcaggaatttgggactgagtttgctgcatgatcctggctcagggaggttacagtcaagatatcagcaggagtttgtggttgaggaatctgcttccaagctggctccctctagtgactgttcaggaggcctcagtttctcaccacgtgggcttctccacagtgctgcttgagcttccttacaacatggcatcttcccccagcacacgtaaccaaagagtgatcaaggaggaagccacagtcccctttaagccctagcctcggaattacacaccatcatttccaccacattctagcaccagaagcccaggggtgcagagcagggggggcaaaggtggagggaggaactcaaggaacaaaccagctcaatactggacttgtccaaggttaggcagcctgcaagctgcagagtggggatttggaccttcatagtctgactccagaccctgtgctgttgcctaattcatctaagtttagtgaaccatgtttttgcttggcatcaggtcctgggggaagctctggtccttctgtccagagaaatctgtacatagatggagatttaccaacacttctaaggagtcctcccagctaagcacttctcccccattcctttgtcctcatttccctgatgaaggtaactgagacacaaacccagtctctattccactgtctgaggccttagggaccttggaactggttcttttcctgttgggggccaaaactgagctctgcactctgttggcagccaggagggaagatggaagagggtggaaggaccaagagccacgaaacctcatgcccttcttgccaggctggtgtcctggatctgagtccactttgagatgaagagatgccgcaatcaccagcagctccttctctgcatccatcttgaggggactctgtccttctctccatgcctactctccctgggtcagcccataaattcatagcttccatccatccatgcacctttccatccacccatcacccatctgcccatgtgtctacatgcctgcctacctgtcacccatctacctgcctatccattcattcattcatccatctactcatccacctacccacccacacatccatcatccacccatcctctcatccagccacacgtccatccatctacgcatccatccatccatccatctatccatccacccacccatctatccatccatccactgatttaccctttcatccatccattcacacactgatccatgtttctatccattcatccacccatccacccatcaattcatccatccatccatccatccatgcattcattcacccatctactcattacctacccacccacccacacatctattatgcatccctccattctcccatccagccacacacccatccattcacccacacatccatccatctaccattcatccattgagtcactcactcatctatccacccactcatctatccatccatctgttcacccatttgcccttttatccatccatccatccacccatccatccatccattcatccatccatctatccattactcatccacccacttgtctatccattcatctgtccatccatctacccttccatccatccattcattcatcactcactcttccacccatccatctattaattcatgtatacatccatccacctatctatcctcccatccacccacacatccattcacccatctacacttctttccatctatccaccaaatttttatcaagcacctactatttaccccacgctatgctaaactcccatcatcagttctgtgactggtcacctcctgagtgactcctgtggccgtcccccagtccccatccccctagacccaatggggctcaaactggctatggcacaccccccaattttttttgagacagagtctcactctgtcacccaggctggagtgcagtggcttgatctcagctcactgcaacttctgcctcgcgggttcaagtgattctcctgcctcagcctcctgagtagctgggattacaggcatgagccaccacgctggctaatttttatatttttagtagagtcggggtttcaccatattgactaggctggttttgaactcctgacctcaagtgatccacctgcctcggcctcccaaagtgctaggattacaggcgtaagccattgagcctactgcccccgactgctttttttgaaccagtttctctccctcagtccctgggcatcagcctcttctcctccctcctcctcgcccccagagctcatggcccccacatcctgccctctcatttgttgccttctctctgcttccacctctgtgttctcctgagttcaaaccttagcttcccctctcccaagctgtgtaatcttcaacaagcatctttcccctcaaacctcagttttctttatctccaatatgggtaacactttctccacctaacaggctgcagagaagatttaaagacgtgaaggtgggtcaggcgcggtggctcatgcctgtaatcccagcactttgggaggccgaggcgagcagatcatctgaggtcaggagttcgagaccagcctggccaacatggtgaaaccccatctctgctcaaagtacaaaaattagctgggcgtggtggcaggggtctgtaatcccagctactcgggaggctgaggcaggagaatcacttgaacccaggaggcagaggttgcagtgagccaagatcacgcctctgtactgcagcctgggtgacagaacaagaccctgtctcaaaaaaaaaggaaaggtgcgaagtggatactatttttggaggtgttaagcctttatattctggtccttggccatctttagtttctaaaaatttctcactccccagacactgacgacccagccagggttcccacccctaaagtattcgtgggtaactgcctctcccgcctggagaatttctaccttactttcaaggtaacagctggccgtctcctccttctgctcatccctgacctctcagggctgggggtgtctgtgtctggctctgactcccccagattgggagcccctcaagggcagtccctgggctgagtcctccaaacccctttgttcattcagcatttactgagcatctgacttatgacagaatgaggatacagtacaaacagaaaataagcaagccagtgagaacaacattgagacaagaaatggggtgactttcagagcaatgactcaggacggaggtttcatttattattattattattattattattattattattattattaatttttttttgagacggagcctaactctgtcgcccaggctggagtgcagtggcgcgatctcggctcactgcaacctccgcctcctgggttcaagcgattctcctgcctcagcctcccgagtagctggattacaggcatgtgccaccgtgccatgctagtttctgtatttttagtagagatggggtttcaccatgttgaccaggctggtctcaaactcctgacctcaagtgatccaccagcctcggcctcctaaagtgctgggattacaggcgtcagccactgcacctggccttattattttttttctgagacaaagttttgctgtgtcgcccaggttggagtgcagtggcacaatcatagctcatagcacgatcatagctcatggtacgtcccactaatttttaaactttttgcagagatgggggtctcactatgtagcccaggcccgtcccgaactcctgggatcaagcgagcctcccacctcagcctcccaaagtgctgggattacaagcgtgagctaccagattgtgcctggctgggagttccatttagacagggtggtcagggaaggcctctctgaggagatggcctggagaggaggaagccgtgcactctctgcaggaagggcgtttctggcagagggaacggccagtgcaaaggccctgaggctggaccatgcccgaagcatgtgaggaccactgaggtcagaggagtgaagaagagtgagtgacggggagtgagggggagagtaggtggaggagagggggaagaggaagcagagacaggaccgccacagtgagcagcttgaattttgttccaagggtgactgggaccaggggacagtagcaaccagaggaacgatctggtttgtttgtttccacttttattattattatttattattattattttttttgagaccgagtttcactcttgttgcccaggctggagtgcagtggtgcaatctcggctcactgcaacctctgcctcccgggttcaagcgattctcctgcctcagcctcccgagtagctgggattacaggcatgcaccaccatgcccggctaatttttgtatttttagtagagacggggtttccccatgttggtcaggctggtctcgaactcccgagctcagatgatccgcctgcctcggactcccaaagtgctgggattacaggcatgagccaccatgcccagcctccatttttttttatttatttatttatttatttatttatttatttatttatttatttatttgagacagaatctcactctgttgcccaggctggaatgcagtggtgcgatcatagctcactgcagctttgacctcccacctcagcctcccaggtagctaggaccacaggtgcacaccaccatacctggctgatttttttttttttgacagagttttgctcttgttttccatgctggagtgcaatggcacgatctgtgctcactgtggcctccacctcccgggttcaagcaattctcctgactcggcctcccaacctggaattacaggtgcctgccaccaagccaggataatttttgtatttttagtagagatggcgtttcaccatgttggccagactggtctccaactcctgacctcaggtgatcctcccaccttggcctcccaatatgctgggattacaggcatgagccaccacgcccagccctgtgatttttaaattttaaatttttgatttaatttttttttttgtagagacagtggttttcctatgttgcccaggttggtctcgaactcctgacctcaagcaatcctcccgccttggcctcccaaagtgctgggattacaggcatgagccactgcgcccggcctgtgtctgtgtccctttgcttttctcttagaaggacacttctcattggatttagggctcagcctacatccaggataattttatctcaagatccttcatttaattacatctgcaaaagacctcttttctaaataagggcatatccacagatccccagggctaggatttggggatatatatatatacatattttttatttttattttttagagacagggtcttgctctgtcgcccaggctggagtgcagtgttgcaatcatagctttttacagccttgacctcctaggctgaagcaatcctcctgcctcagcctcctgagtagctgggactacaggcacatgccaccacgcctggctagttttttattttttgcagagatggagtcttgctatgttgcccagactggtcttgaactcctgggctcaagcgatcctcccgcctcggcctcccaaagcgctgagattacagacgtgagccactgtgcttagcctggatttatcttttggggagccaccatctaactcactccaggggtgaccacagaaccaatgaccaaatgtcagggtgacccagggacagcaccctgagggagaagcaggcagcctgcgtggacgatttagtgaagggtggacagggtggcttcttgaaggagggaatgtttgggatgagtcgagagatggaaggattttcacagatggaggtggagatgggggtgagtggggacaaaacttaccaagatttggaggccagaacatgcccagtgtgctgttgagtggcagctcatgggagcctctgtcagctaatgaagggggtcaggttaggtaaggaggggtctcaaccagggtgatcctgcccccgccccaggacactggctgctgtctgtggacatttgtggttgtcacgacttggggaggagatgcacctggcatggagtaggtggaggccagggacgctactcagcaccctgcagtgcccaggacggccccaccccagaaagcaattcaaccccaatgtccacagtgcccgggggagagatcctgtgttcattactttggggaaaaagttgaatcctctccctgctcacatcagacaccagaataagctcccgatggggtagacagtagaaaccaggaggaccccagctcctgggactcacctcctgtctccctccccactcagggtgcggattttaatgtgtgcagcctcctgggacctcagcagggaagcgggtcatgggacatagtctcttgggggtctgtggaatcccctaacctggggagggggtctcaatcaggggtgatccagcccccaggagacactgagcaatgtctgggaacatttacggttgtcacgacgtgggggtgctgctggcatggagtgggtggaggccagggacgctactcagcaccctgcagtgcccaggatggcccgactccagagaacgatccggccccaatgtccacagtgcccgggtgggagagaccttgcctaggaagataaggagcaagtaatgttctggaagagtgttatctaatagaaagagaatgtgagccacatatataatttaacatgttccaggagcaatatttaaaaagtaaaaaagaaacaggtgacattaattttaataatatatttcatttgaacccaatatatcccaattcttaccattttaacatgcagtctatgtatttctatttttctttttttatttattgagacagagtctgtctccatcacccaggccggagtgcaggggcgtgatcttggctcactgcaacctccacgtcccgggttcaagcaattctcttgcctcagcctcccaagtagctgggatcatgggcacccaccaccacgcccagctaatttttgtgtttttagtagagatggggtttcgccatgttggccaggctggtctcgaattcctgacctcaggtgatcctccctacctcaaatgatccccctgcctcagcctcccaaaatgctgggattacaggcgtaagccaccgaagactggctaaatatatgtatgtattttattttattttatttttagacatagggtcttgctctgttgcccaggctggagtgcagtggcaagatcatggctcactgcaaccttcacctcccaggttcaagcaattctcctgcctcagcttctgaagaagctgggaccacaggtgtgtgccaccacacctggctaatttttttttttttttttttgagacagagtctcacgctgtcgcccaggctggagtgcagtggcgtgatcttggctcactgcaagctccgcctcccaggttcacgccattctcctgcctcagcctccctagtagctgggactacaggcgcccgccaccatgaccggctaattttttgtatttttagtacagacggggtttcaccgtgttagtcaggatggtctcgatctcctgacctcgtgatctgcccgcctcggcctcccaaagtgctgggattacaggtgtgagccactgcgcctggccacctggctaatttttaatttttttgtagagataaggtcttgctacattgcccaggctggtctcaaattctggggctcaagcaatcctcctgcctcagcctcccaagtgttgggactacaggtgtgagtcactgtgcctggccatgactctactttttcatcagttttacaaaatgcacctacagatcaagggttgctgatagaaattaaatgtccaggtcgggtgcagtggttcatgcctgtaatcctagcactttagaaggccgaggcagggggatcatgaggtcaggagttcaagaccagtctggccaacataatgaaaccccttgtctactaaaaatacaaaaattagctgggcatggtggtgcatgcctgtaatcccagctattcaggaggctgaggcaggagaattgcttgaacctgggaggtgaaggttgcagtgagccgagattgcaccactgtactccagcatgggcgacagagcaagactccatctcagaaaaaaaaaaagaaattaaatgtccaaatctgtgagagaacaatatacaccagattttgaacatttagtatggaaaaattggattggatgtgaaatagctcattaataattttcaagaccaggcctggtggttctcacacctgtaatcccagtgttttgggaggctgaggtaggaggattgcttgagcccaggagtttgagacccacttgggcaacatagagagatcccatctctacaaaaaattttaaaaactacctgggcatggtggcatgtacctgtagtcccaaccacctgggaggctgagacaggaggatcacttgagcccaggaggttgaggctatagtgagctaggattgcaccactgtactccagcctgggcagtggagttttatttttgtttcagacaaaaataaaaacaaaaacaggaggggcccagaatggactgaagtttgctgaagcctgttctaggccaacactatccatggaacatttgcagtggtggataagttctctgcctgtgctgtgcagtgtgctgatcactagctccgtgaggctgttgagcctttgaattgggacgagtgtactcagaaactgatttttaaaattcatttattttattattttatttttttgagacggagtctttctctgtaccccaggctggcgtgcagtggcgtgatctcggctcactgcaacctccgcctccttggttcaagccattctcctgcctcagtctcccgagtagctgggattacaggcacgcacgcccagctaatttttgtatttttaatagagatggcatttctccatgttggccaggctggtctcaaactcctgacctcaggggatccgcccatcttggcctcccaaagtgctgggattacaggcatgagccaccgcgcccggccaagaaactgatttttaatgttacttagttttagtaatttgaaatttaaacttaaaccaccacatgtggctaatggctacaatatcggacagtgcaatccagcatgttctagaccgggggcagctgctgggttacagagcacagatccagagtgttctagactggagcccagctaccatatgggacgtagactgttctagaccagagaggtcaattactgtatcatggacagcataggtctagaatattctagacccagggtctggatcatatcggacagcacaaatctagagtctagaatctaaagcaagagaaaggcaagatttaaatttacacttaagggccgggcgcagtggctcactcctgtaatcccagcactttgggaggccgaggggggtggatcacccaaggtcaggagcctggccaacatgatgaaatccatctctactaaaaatacaaaaattagccgggcatggtggcacatgcctgtcatcccagctacttgggaggctgagacaggagaatcacttgaactcaggaggtggaggttgcagtgagtggagatcacgccattgcactccagactgggcgatagagtgagactctgtctcaaaaaatttttaaaaattaaaaaaatagataaatttgtggctcacgcctgtggtcccagcactttgggagaccgaggtgggcagatcacctgaggtcaggagttcgagaccagtctggccaacatggtgaaactccgtctctactaaacatacaaaaaattagctgggcatggtggcaggcgcctataatcctagctactcaggaggctgaggcatgagattggcttggattcaggaggtgaagtttgcggtgagccgagatcacgccattgcactccagcctgggcaacagagcgagattctgtctcaaaaaaaaaaaaaaaaaaaagggaggggagaccaggctgggtgctgtggctcatgcctgtaatcccagcactttgggaggcagaggtgggattacctaaggtcaggagatcgagaccaggctgattaacatggtgaaactccgtctctactcaaaatacaaaaaattagccaggcatggtgtcgcgtgcctgtaatcacagctactcaggaggctgaggcacacgaatcgcttgaacccgggagacggaggttgcagtgagccgagattgtgccactgcactccagcctgggcgacagaacaagacactgtttctagaaacaaagaaacaaacaaacaaacaaatatttcttaaactatttaaaagtactacacacggccgggcacggtggctcacgcctgtaatccccgcactttgggaggctgaggcgggtggatcacctgaggtcaggagttcaagaccagcctggccaacatagtgaaaccccgtctctactaaaaatacaaaaatgagccgggcgtggtggtgggcacctgtgattccagctactcaggaggctgaagaaggagaatcgcttgaaactgggatatggaggctgcagtgagccgagattgcaccactgcactccaggctgggcgatacagtgagactcagtctcgaaaataaataaataaataataaataagtaaaagtagtacacacacttacagaaaagtgcatgaaacataaatacttacaaaacaaacatcctgatgaccactacccagccggtcctctggaatccaccccatgccgtattactaagcccaactcttttctttctgctgaaggagccactatctggttgtcggtaacacgcctttgcttttcttcgtggttttactggatacagtggtgtgcccttggaattccagctactcagtaggctgaggcaggaggatcgcttgagcccaggagcttgcgaccagcctgggcaacatagtgacaccccatctgaaaaaaaacaaaattctctatggttttgccatttataaatatgtccctaaagcactaggtgtttttttttttttgcctgttttccttttaacctaacataaatgggataatagtctgtcatcttttatgtgtgccttcttgtttcactgttttttctttttctttttcttttctttcttttttttttttaagagacggagtcttgctgtgtcacccaggctggagtgcagtagcgcaatctcggctcactgcaagcttggcctcccgggttcacgctattctcctgcctcagcctcccgagtagctgggactacaggcacccgccaccacgcccggctaatgtttttgtatttttagtagagatggggtttcaccatgttagccaggatggtctcgagctcctgacctggtgatccacccatctcggcctctcaaagtgctgggattacaggcgtgagccaccacacccggccttttttttttttcttttttgagacagactcttactctgtcacccaggccagagtgcagtagcgtgatcttggctcactgcaacctctgcctccctgattcaaaatcttgtgcctgagcctcccaagtagctgggattataggcgtctgccaccacacccagctaattttttgtatttttaatagagatagggtttcatcatgttagccaggttggtctcaaactctgacctcaagtgatctgcctgcctccgcctcccaaagtgctgggattacaggcacgagccactgggcctggcctgttttacttaatttaatgatgacgagatttatctatggaaggccgggcgcagtggctcacacctgtaatcccggtgctttgggaggccaagaccagaggattgcttgagcccaggagttccagaccagcctgggcaacatagcaagaccccatctctacaaaaaaataagaaaactagccaggtgtggtggcttgtgcctggcgtcctagctattgaggaggctgaggtgggaggagcatttgagcccaggagattgaggatgcagtgagctattgatgcaaagcagacaagggcttagcctgggagggttcttggcttcacctgggaaagaattcaagggtgagctggtgatgttagcagcttttattgcaacagcagtgtaaacggcagtggaggtcctgctctctgcagagcagggccaccccatgggcagtgagccccgagcagaagttcagaggcagttctgcaggtatatttgtacccacttggttttgttttttgtttattttttgagacagagtctcgctgttttttgaggcagtatcttgagacactcccacccacgccatgacagtttacaaacgccatggcaatgtcaggaaattatcctaaaagtggaggacccttcagctccaggaactgcccacccctttcccagaaagctcgtgaatcatccatcccttgtttagcatgtgatcaaggagtaaccataaaaatagccaacaagcagcccaggcggctgctctatgcagtagccattcttgattactttcttttcttttctttttctttttttctttcttttttttgagatggagtctcactctgtcatccaggccagagtgtgatggcgtgatctcagctcactgcaacctctgtctcccgggttcaagtgattctcttgcctcagcctcccgagtagctgggattacaggtgcccaccaccacgcccagccaatttttgtatttttagtagagacgaggtttcactatgttggtaaggctggtctcgaactcctgacctcaggtgatctgcccatcttgacctctgaaagtgctggaattacaggcgtgagcgcaccacgcccgacccccacttttaattacatttaaattaagggacagattatgcagaaatttctaagaaaagagtgggacgtttcgggtcattgggtcattgccatggaaaggcggtaacttctaggtgttgctgtggcaacggtaaacggacatggcaccccggtgggcatgtctcagggagagctgcttcgactccatccctgttttagctagtcttcagtttggtcccgtatctcagccccgcctcctgagtcgagtctcacctcctacctcactatgatcgcaccactgcactgcagcctgggtgacagagtgagacccagtacaaacaaaaaaaaaaaaagaagaagaagaggaaagaaagaatcacgtgtgttgctgtgtgtatcagcgtcttgggcgttttcactgctgtctagtattccaggatgcaaatacgtcatttactcatccattcccctgttgggggacacttgggttgtttcacatgtctgttgagacaaatagagatcctcaagggtgttctttggtggacacacgtcacacttctctcaagtgtatccccaggatcatcagcctctgtggctaacacccacctgcttggcaaaggtgagacctgtggcgtgtgccaccttttcccaggaatgcctgcagaaatggagccagccttttggagtgagaatgggaggctggtgaggggcggatgggggctgctggggaggaagaccccccggcctgccagccacgtctgagcacgctcgctcatctgagctcctgctgacagctcctctgcagggagctgaagcacgaggttcgccctgtgctggaaaagcccacccaggcggctcacgtgcctgcacacgcccgcacgagcacagcctgggagtcggggaggagctgggtcacgtgagacaccgagacagccaccatctctcctgtgccctgcttcccccacccaagaaaacacctctgtgtgtgcgtgtgcgtgtgtgcatgtgtgtgtgtgtgtgtgcgtgtgcgtgtgtgttgggggacagtacgagtggacccttctgtctctttataagccaggaggggagtgatccaggtcatttgcttgactttccacttctaccccctcatcctggcacaggggagccccccccaccaaccgcccggcccaatactgctgctttctgaagagagggcaacccccccgtttccggttcccgcacaagtgtgacagcagtgtccatgggggacgtagtttaatcaactctcagcattctggaataggatccgaaattgaataacagaatcccagaatagatcctggaatggaccgtgggaccctggaattgaggctcagattccaggggaagctgctggctgggccgtcacagccccggacaccacttcccatccccaaagccagagcctggggttcctggagacagagagccccccaacactgggacagtgcggggaggggcagagggtccagcttctgtcccttggccagtgagggaggggccaggacctttgggactttgctgtctctttctttacaagagtcttgggggctgaggtacatcccagcaccctcagccaccctgctgctcatctgattgccctggaaaaagatgaatttgtgtgtctgcgtgtccttccctgctcagacgtggcagctgccttgagtaatgctgccctcctgaaacccctctctgtgcagggtcacagaggtggtcccctggcaggacccctacctcccctgcttacctccatgctgcaggacttggcccagagtgaaaccaaacctgagaatgggcaaggggccttaagacgcccagtgtgacagtttcacctccccagacctcagttttgtcatctataaaatggggccctagaagtagatttttgttttgttttgttttgcttttttgagatggagtctcgctctgtcgcccaggctggagtgcagtgatttgatctcagctcactgcaacctcggcctcctgggttcaagcaattcttctgcctcagcctcccgagtagctgggattacaggtgcccgccaccacgcccagctactttttgtatttttagtagagatgcggttttaccgtgttggccaggctggtctcgaactcctgacctcaggtgatccgcccgcctcagcctcccaaagtgctaaagtgctggggttacaggtgtgagccaccacacccggcacctagaagtgtttggaggactctgtaaggtgaggcctgtcaggtgctgaacgcagaacccgagctcggcacacaggcacagaataaatgaatgaataatgaataaatgaatgaaccatcctgggcacgtcaagctgcgagactcggggcgtcgtgtcatctttctgggcctgtgcagacaccaaattgtaagacactgcctggcaccagctcttgggtgacttcccgtgccaggcactgtgcccggcatgctcttggctgatggggatggagcctgggttttgctttccgaggagtctacaaacccgtgtatcatttccgctgtcatttgtggaccctgggctaagggtcttggtggggaacggagggtcacaaagcccagtgcccttgtgcccctgcctcccaccggagctaccccaagtgaggggcagtgtgtgtgtttagtggggaggggtcgtaatcaaggtaatgcctgggcaagacaatggaagcagatggagagagagcacggaagacttcagggaggaggtggcgtttgaggggtaaggatggggtgcagcgggggggcattctgtcaccagccacgttcagggggccatggcaggaggagcggggaggaatgactggggctgagcagcaaagggccctcaaatgccaggatcaagggctgagcctctacccagagagcaatagggagccacagcagcgtttagagcaggggaggggcttggcctgggtgtttcagagaggctggactggggcctaggtgggaggggaggaaggtcaatgggtgtctggggcagcccagataaggggtccaccttccttccttctctccacaccacttggaaataacccatctggggcttccactaaatctcttttttgagacggagtatcactcttattgccctggctggagtgcaatggcacaatcttggctcactgcaccctctgcctcccgggttcaagtgattctcctgtctcagcctcccgagtagctgggattacaggcgtgcactaccgcacctagctaatttttttgtatttttagtagagtcagggtttcaccatgttggccagggtgatctcaaactcctgacctcaggtgatccacctgcctcgacctctcaaactgctggggttacaggcgtgagccaccgcgcccggcccctcctctgaacctctactcttccaaaggcacaactttgcagatcccagagactccttggctgccccagcctcactgcaagacactcctcctgcagtcgttcccattccccaccccccaaggggcctcagtttccccatctctagcatacacaggtcagacagaaaggactgtttctcggccagccagtgcaagcccacccatgcccacagtgccaaaacgctccccagcccacaggaccccttggttggagggatgtctaggtccttaggacacctctcccttccccctctcccttttttggagatagggtctggctctgtcgtccacgccggagtgcagtggaagcgatcatagctcactgtggcctcaaactccttgggttcaaacgatcctccctccttggcctcccgacctctcccttctttctggtcttggtttgcccatctgtaaaatggaaatgcatgttttcatctcattaagttgtcttaagactaaacgggtcagcagatgtgggtgttgctccaacatgaaaaattgtttccaatcgttccaaactccgactcctactccaaaattcacagtgaattttccatcttcagtgcaggcccaggacagcctttggctcttcactctcctctaccctcagctctcccagctccaaccctgaccccatgggagagtttgtgtctggctctgtctcccgctccgccaggctggtgaagggtccttcctggagttccaaaattgaactcagccttgggggccccagaaccagagagtcatggggcacagcaggaatactgctgaagaaacggagaggaagggaagggtcagggaagggacgcagccatggggagccagagaaggtggaggagggagggagtgcactcggcagagacctcggtgggacagatggagagagggagccgggaggaggtgggcagagccagatggacgggcaggggcgacaggaggggtggggtgtggggagacccagatccccgcctggcacgcctcctcccggctcgggcgggcagcgcgggcagggcccgcctgggcgtcgggcgcagggcgcgcggcgcggggcccgagcgtgcagtgcggcgggtgcgcgcctgtgcgcccggggcggccgggcgggcgggcggcggcacgtggatgccagcctggcgcgcgtctccaggccggtgggtaaggcgggcgccgggccgcggggtggggacggccgggccgcggagctcggctttagagtggaggcctggagaggagggggctacccaactggcttcactggaccagaccaggaccccctctccccggccgaccctctccccgagctgacccagcggtggggggaagggacctcccagtaggaggcggaaggtcccaggctctgtggcgggtggggagatggggagcaggtacaccagccccccaaccccagaacaaggtgggggtggagggttcggtgatgggggcagcttctctccccgcggccgcccctccctccctccctcgtccatctccagaagattatatttaaatatctcttttgtgcaaggcaggagctgggctcgcccctaagaggcggtttccatggcaacaacaattgccagcttccgtgtggtgaatcagcgttgccatggcaaccccatcctcatctgcccaaggtgctgggaggggggaggaggtgagggccaacggaggtggggtgggaggggtggggggagcaggagtctggagctcctgcaggtgcccccccatctctccccacctcccctggcacccccccgcttccagcccagaagctggtcccatctggttgaaaccatctcccctcctgcctccagcctagcagggtgtggtacccaggtggaaagggccccggtgtgtatgcatgggtgatgtggggtgggaaaggggtccagctggctgggtgggggaagagcatggaggttttcctctcctaggtgatcagggtccctctgagggtgcggctgggcggcaggaaggttgggctgggaggattgggggcacaggatcagggaggcaggggcctcttggtttctggggccccaaagactgagttcaaattgaggaaagcatatgtgcccgggacatacactcaggaaggagggtgtcagaatgggagagggtcttagagaggggaggggacccagagatgaggaagggcctctgaagcaggagaggctcagcgagaggagggaagctgagggggtgggaggtggaaatccagaggggtctctgaggaggggagtgcaaaataaggggttgctgagggtggaagagtgggcacggagctggaacgggtcttagagaaggtgtcagatcacgagggacagagctcagtggggagactttgggggtcccaaaatggggaggaggcattatttatggcagtgggtggacagatcactgaatctggagtccagaaactcttcactcaccatggccttacacaaataacttctctcttagacaaataacagaaatctcaatgttgacatctgtagaaaggggtgaaaattgcacctctctctgaagcttgttgggcagctatgctgtgattagaaaacctggcatttggccgggtgcaggggctcacgcctgtaatcccagcaatttgggaggctgaggtgggcggatcacgaactcagcagatcgagaccatcctggccaacatggtgaaaccccatctctactaaaaatacaaaaaaaattagctgggcgtattggtgcgtgcctgtagtcccagctgcttgggaggctgaggctggagaattgcttgaacccaggaggtggaggctgcagtaagccgagatcacgtcactgcattccagcctggcaacagagtgagagtccgtcccaagaaaaaaaaagaaaaaaagaaaagaaaaaaaagaaaacctggcactttttcaagcgtattctctgctgaaactcaaaagtcagaagatcagaaagagcactttggaacccataggactcaggggatgtgggaatctatttcaagtttgtctgacttggaaaaaggtctgagagtagcactcattcccattccagacgcctttctgtgttggtggaagttggccacttccttctggcccattctgttcagcaggtttctccaattcctccatgtgtccttccccatgtggggagatgccgtggttccctgtctggagagagacagagcaagacatagacacttacagcctgagggagggggaggaaggagcccagaagagtgggaagagtccctgcatgggggcttttaagttgggttttgaaggttgagtgggagtttgccacagacatcaggttgggagaaggattgtgtcccaggaccagtggagatgcaaatgcctccccaactctcacatccctggagcctgttctcaacgatccaaaatagctcatacctaggacttggtatgttgtgagagttggtgccagtgagaatttttttttcattaaatatcattttcaatgcctggggtgggggacaaaagtgtctagaacaatgaatccagatggcaggctggtccactcaggtatgtccccacccaaagctcctggcatgactccacccaaagctcctgggagatgtggctaaatgtagctactttggtgtatcagtcagcactgctgagtaacaaactactccagtcattgtatttgttctcgattctgcaaagcttggtctgggctcagctggacggctcttctgttgggctctcctggggtcgctcaagcagctgcagtcagctgagacttgactgggcttagctgggtcagggtggcctcactcccctgaggtggctgtcagagaggcctctgtctccatgaggcccctcctcctcccctactgaggaggaggggcctcctcctgggcctatccacctggcagtctcagagttccaagagtggaagccacaaggtctcttgaggcttaggctcagaactcccgcaacttaacttccaccacattctatgggtcacagcaagtcacttggccaagttcaggtgccaggagtgggaaaatagactctagttcttgatggtaggaactgcaaagtcacatcgcataaagggactggaggaattgggcctatcacatttggggaagcaaggaggcttcctggaggaagggatattgttgggttttgagagctaagagttcgccacacagtttccgctgtaggtgggacagtgtgtaatttctttgactggggtgttagttgggtggtggggtgctgagggctggtggtgggaggtgggcagggctggcctgcagagctcaggcaaaaccccccgcctgccacacccccactgctaagcttgacttttcccttccccctctctctgcagatggcgcggccaatccaggtgaagcctgcggacagtgaaagccgcggaggtagttgtcatctctccgtggctgccaggctgggggttggcggaggaatgggagaagaaggaaaatctcttccttcctctctcctgcaaaaggggcagtggccgaggcctgtggatctggaactggcctccctgccccaaagcatgcagtagtcgcatgcctgctcacacaccttttggtggggggagaagcaggttccagagagcagaaggggctatgtccataggccccaagggaggatggggggtctagccaggtccagctgccttctcctgagtttgaaatactccactcccttcagggtgcaataactggggggcttcagacacagacaatgggggcctgaagggctgtggattgctctctggggtctccgtgtggaaatgtgtgtgtttatgtgtgcatgcttaaatgtgtgtgtatatgactgtgcacacctggcatgcctgtgtgcagatgtgtgtgagtacgtgcacatgtgcatttgtgtttctgcagctggtgcacataagcgcacatgtgtggtatgcagtggggatgccttcctgcctgtgtgcatgtgcgtgtgcccagcccgcgcatgggtgtgtgtgtttgcacatgtgtgcctgactgttggaggctgggcatgtgggcagacatgcaggctggggccagtgttgtctgtgtggggctggaccttggtgtcagggtgtgcccatggtgggggcatactcagctgttcccatgggacccaaatctagtcattcttggaaatttgtatatttcctctccatctcaagtggagactgaaggagggcagccagatttggttgagtggaggcatggagcaggagtgttaggatacctaggtatatgtaggagtccggtaaaggccctctgggatgggagcccctttcacactctccaccctggctgccagcgtgggacagggagtagcgaggtggggtctgtatgtctccatttttgtctctatttctctgtctctctctccatctccctctgtatctccttctcctttttctcttctcttgtctcttcatccctcttattctctctgtctctcacagtctctttcgcgcgcactctctctctgatctgtctctctctctccctgattctcagtctctctgctggtttctctctctccctcccacccccatgagtgacagctgccgagagcggtttccatagtaacccagctcaccgtccctaggagatgaagccaccacgttccccattaccagggagcatgcagttacccaagggggcagagctcacacaggagaggctggcccagctccggcctcagaccaggttccagcccagccccacccagcagggggtccagcctgccaaggcccctggtccactgagcacgtgaaccctcactccactccacagatggtgactgcctggcccctcttgatcccgacaaagttgggcaggggcctctgctgggcaccgtgaaagtgcggggaccatcagtgcccacctccgcctggcaggtccggggagcagacagaaagacagacagacagacagacagggacccaggcccggcgaggcagctcctagccctagtactcggtgcgggctctctgagtgcaccagagggaaaggtcatctccgcctggagggggagcagtggagcagagaccccaaaagactgcagggagggcattccaggcgggggcgccacctgggcaaaggccgggagatgggagcgtgcagggcccgtgggagggtggagagatccggggcagggaaagggcgcggctgggtcctccctcgcacgcgcagaaccggagccggcagggcccgggcgccgcgtcttcctgccctgccgcctccactctgctggagggagggaggaatcccggaggccctcccggaggccggggactcggctgaggtgggtgtcgccgcccacaggggaccggaagctgttcgtggggatgctgaacaagcagcagtcggaggaggacgtgctgcggctgttccagcccttcggggtcattgacgagtgcaccgtgctccgggggcctgacggcagcagcaaaggtgactggcgggggccggggcgggactgcgagaggggccgggctagctctgggggcggggcctgtggggagggtggggcctgcagcatggggaggagctggctctggggtgggaccctggggaggggcggggcttctccaggggtggagtctgtgggtgaggctgcaggggcggggccttggagaggggcggaattgcaggggcggggcctggggaggggatggggctgcagggtggggaggagctgcctctgagggcggggcctgtggggcagggccctggggaggggtggggcttctccaaaggtgggcccttggggagaggtgtggctgcaggggtggggaggagctggctctgaggatgtagccctggagaggcccgaggcttctccagagctgaagtctgtgggtgaggctgcaagggtggggtcttgggtaggggaggtactgcagggaggggtgaaatacgtagagttaggagggactggctccagggggagaggccctgggaagggtcggggctgagcatatagggggtggggctggccaggtggggcggggccaggccaataggaggctggggctggctgggagaagctggttcacaggggttgggtggagcagagactggtcccgcttgatcctacctgcatgctctctctgcatgctggctgtggggacgggccctgaagaggggcggggctgcggtggggtgggcggagatgcagaggcgtggccttggggaagggcaaggcttctccaggggctgcttatggatggggatgcaggggcagtaccttgggatgaggcggtgtctggtgggaggcgggggggcttctccaggtgctgcctgtgagtagggatgcaggggcgtggcttgtgatggggcggggtctggggaggggcggggcttctccacggacagagttacctgtgccctgtggtctcagattcctccacctgactattcgtaaaactgtttcctcctggttctgtctatgtgatttgtccatatgactgactggtggtctctggttgtgtctgtctgtctatcttcctgcctgagagtccaaatgacggtgtctggcggtctctgtccacagagctcatcatgtgggaccgactccactctggtctttcttaccttactagaactgaatgtgtctgacggtttcagaccattacctggttcttcctttttaaaattgagggctgggcgtggtggctcacgcctgtaatcccagcactttgggaggctgaggcaggtggatcacgagatcaggagttcaagaccagcctggccaagatggtgaaacccgtctctacaaaaaatacaaaaattagctgggcgtggtggcaggcgcctgtaatcccaactactcgggaggttgaggaagagcattgcttgaacccgggaggcagatgttgcagtgagccgagatcacgccactgcactctagcctgggtgacggagcaagactctgactcaaaaaaagaaaaaaattgagatgtcttccacatcctaccaaattcaccctttaaaaatgtacaatgaagtgctttttttttctattcataaaaccgtgcaaccatcaccactatgtaattccagaacattccaccccctccctccacaatatggctggcccttccatagtactctaccagtctggagccaggtgcagtggcctctgtatgttctatggactttgtcggtgggactgtgtttccattcacctgtgtctggtggtctctgtgtgtgtggctgtctgtctgcattagcctggctggctgtgtgggtgaccaggtctttgtctaactgtggctgtctgtctgtgtgattctcctccattctgacccttgatctggctgattgtccagctgtccgtctgagcaaacggctggctgtctttctgttatcagttctctctggctgcatgtgtctgacactggccatgtaggtctctgtgtcccctctcctgtggcccccgctcagccagtcctgtgaccccatcaccctctacctcttcttcttctcttggagcaggctgtgctttcgtgaagttctcctcccacacggaggcgcaggcggccatccacgccttgcatgggagccagaccatgccggtgagttggagctgcccttggccgtgggggtgggggtgggaaaggggtgagggggacagggatgaaacaggccatattcctaccgtcgctgtcatccggtagcccctggctgtccttcagagggggcacaggtggagaaagaggcgcagtccctggctgtggtccctggagtgggtatacacgtgtgagtgtgtgcagatgtggaggtgagtaggcaagcgaagtgtatgtgtgtgcatggatgtattacaagtgtgtgcgtgtgggtgagtgtgcatgtctgggtgtgagtgtgcccgagactgcatgcatgtgtgtgtgtgagtgcgtgtttgagtgtgtcattactagtaggcgagtgttatgtgagtgctgtgtgcacgaggggtgtgcgtaaatatgtatggataagtgtgccattgtgtgctagtgtagagatactagtgcgtgtgcgtgtatgagagtgtacatgtgtgtttctatgtgtgtgagcgtgtgtgtgagtatgcctgggccacgggggaggaagcacatgtgtgtgcatctgcaggtgcatttgtgggcaggtttgtgtgtgtgtgtgtgtgtgtttgtgtgtgtgcatgactgtgagtgtgtcagtattgtgggtgattgtgtacacgtttgtgagtatatgcaggtctgtgtgagtataggttgtgagtgggtgagtgtgtatgtgtgtacatgtaagggtatcctaaggggatgacacctgggttggatttgctgaggccaggagaggccctgacaaaaagaaaggctgggaggtggcaacaggtagcccagaggagccatagaagatggggccgcaatgcgaggctgagaagcctggactttctcctagggcagtggggagccacagacggtttagagcaagggaggagacaggccaggtcggttgcaaatatccctttggggctaatgtagaggatgggcagggtgcaagactagaggctgggaggccaaagaggaggctaggccaaggtccagctgaggtaggaggaggcctgagctggggccaggtggacagggaggagggctgatcagaaaacagacattagggtgagaatggatggggggcctgttgactcactggttgagggaggggtggggattggggacaggtcccagagtctgcagcagtgagaggctggggaggaccaaggaggcactggggactgcccttcccccgaggaaggagtccccagaagccattgttcctgcacccacatctccgaatctgctacaaggaagatgggacctgagaggaacaagccacctctctcagctcttaaaacccaggggaggggcttagttcagcacaagggcaagtgttcccaagctcagagatgtcccaggacagggctggtaggcgtctggaggagtgagttctctatcggaggaggcatgtcagcgaagacagggaggcaacagggtgcatcctgtgggagccagctcaccagggaggagctggtcgaaggggaagatattttccttcttgagccccagagtcggggtgtgggctggtttgtgaggggtgggaatggcctcctggcccctgcctcaggcctctcttttatttttttgagacagagtctcgctctgtcgcccaggttggagtgcaatggggcaatctcagctcactgcaatctccacctctcgagttcaagcgattcttctgcctcagactcccaagtagctgggattacaggcacgcgccaccacacctggctaaattttgtatttgtagtagagacggggtttcaccatgttggtcaggctgatctcgaactcctgacctcaggtgatctgcccaccttggcctcccaaagtgctgggattacaggcatgagccactgtgcccggccaccaggcttctcttgttaccgatatcaggacctgttgcagcatcctgactgcacagacagacactccctggctcaccgctgcttcgactgcccagggctgcctgttggtggatttcagcccagccctgtggcacctggacagccatggagtgggatggcagtcacatgggtttctgtctgtgccccagcaaagcagggcccccagtccccaccagtggctactgtccgctgtccactgggtggatgggccacaggttcatctgcctgcaaagggcacaaaaatctggggctggggctgggcgtggtggctgtaatcccagcactttgggaggtcgaggcgggcggatcacttgaggtcaggagttagagaccagcctggccaacatagtgaaaccccgtctctactaaaaataaaaaaaaaaattagctgggcgtgatggcgggcacctgtaatcccagctactcaagaggctgaggcaggagaatcacttgaacctggaaggcagaggttgcagtgagccgagatcgcgccattgcactccagcctgggcaacaagagcgaaactccgtctcaaaacaaaacaaaaaaaatccgggtccgaactgcctgctagctccagggcatggaggacagagtcaggatcatctacttgtcccgccttgttcctctcctgtggctggagtctcacctgttctcaggtgtgggtgagaattggaggctcacccatctgtgccccagttgttcctctctggagactggagtttcaggtgtggggtgacaatggcaggttcgtccacctgagcccactgttttccttcggaagctggtttctcacctgttctcaggtgagcggaagtcataggtgcctccagctgtgcctccctgttctccagcggcgggattctccatctgttttgagtgtgtggctgacagtcagggcccccacctgtgccccatcacagcctcctaggcctgggcgctgcacctgtgcagatgctgctgggcccaggatgctgatctccacgcggtcctcgctgtggccctggctcctggggtgggggcccgtggacatggctgacagccactggcattacacccctcacccaggaggcctgagctaacatgaatccagggaccccagagtcctggctacctcccagcccgtttccctccctgctcgccgctgcccctgcagggagcctcctccagcctggtggtcaagttcgccgacacggacaaggagcggacgctccggcgcatgcagcagatggtgggccagctgggcatcctgacgccgtccctcacattgcccttcagcccctacagtgcctacgcccaggctgtgagtgacccagtgacagcttcggggctccggctccgtctctctcagtctctgtctactctctgtcgggctcctgcctctccctccatctccctgactcagggtcctctcctggcgtggctgaaccccaactccaaattgagaccaagctcagaccgagcccctaaatccagaagactgagccctaatctcacagtaacacccaatcttggaccgagccccagaacctggctatgctccacgtctaaattaggcccaattctggctgaacctccaaatccagactgatcccaaactgagacctgacctgatcaagctccaccctggctgagacctgatcccaagttgagccccagctcctgactgaaccctgatcccaggctgagcctcaatttctaactaaaccctcatcctagatggagccttgatctcagtctgagcctcacttcctaaccgagccttgatcctagattgagccttagtcccaggctgagcctcgcttttctaactgagccctgatcctaggctgagccttgatcccaggctgagccccaattcctgactagattgagccctgatctcagcctgagcctcacttccgaaccgatctctgctcccaggctgagccttgatcccagtctgagctccaattctgatctcagcctgagccaagatacccagcctgacctcctcactagtaactggggtaccaagcctcccctcataagccatgatctcagggcagatatcaccccaactgtgacatgtcttcacccccagctcatgcaacagcagacaacagtcctgtccacctcgggcagctacctgagtcccggcgtggccttctcaccctgtcacatccagcagataggcgccgtcagcctcaacgggctgcctgccacacccatcgctcctgcctctggtgagcctcctccaggcacccaaggatgggtgggcagggctggagccagaactggcctccccatgaccctcttccgctctgcagggctgcactcacccccgctgctgggcaccaccgctgtgcctggcctcgtggctcccatcaccaatggctttgcaggtgtcgtgccctttccaggtgggcaccctgccctggaaaccgtctatgccaatggccttgtgccctacccaggtaaattggggtcgtcctctggggcctaggagagtggtggggaataaagatggtgtttctggaacaagtatgagtccctacatcacagtgcccagggaacagaagggcaggaaaaagggtgtctccgctgagcagataagagctgtggacacaggaagggaggccgtggcagggtaataacacattaaaacggtgcatctggatgtttctgagcttaaattccagttcagtgaccctggatgggctctttacgtccctgagcctcagtttgctcatctggaaaatggggcagataacatcagtagcctcagagggttgcattgacaatttaatctgtgtgcaaaaggcttcacacagggtctcactctgtcgcccaggctgcattgcagtggcacaatcttggctgactgtaacctccgcttcccaggttcaagtgattctcctgcctcagcctcccaagtagctgggattacaggcgcatgccaccatgcccggctaatttttgtagttttagtagagatggggtttcaccatgttggccaggctggtctcgaactcctgacctcaggtgattcacctactgcgcccagcccataaatcttaattattcatctgtgtcatttggggagatatcaatgcctggattcattcatttatccattcaacacagaatgaatgacccactgatttaggctgcacctgctttcatgaagcagaggtccttcctttctctatgctacacctacaattttagggcaaacatcttccaacatctaatttatgtgaagtaagttatctgtctttccaccatgtaggagaatttgtttctaactttttatttttttaattatttttatttatttagttttagagacagtgtctcactgtgtcactcaggctggagtgcagtggtgtcgtcgcagctcactgccgcctccatctctggggcttaagcaatcctcccacctcagccttccttgtagctgggactacaagcatgtgccatcacgcccggctaatttttaaatttttgtacagacgggatcttgctgtgttgcccaggctggcctcaaattcctgggctcaagcaggcctcccaaagtgccgggattataggtgtgagccactgtgactggccttaacattttattttgaaatgattggaggttcacagggagttaccaaaataccacagagcagtcccaggtacccttcacacagcttccctgatgccagcagcttatctaatcataggtcactgtcaaacccaggaaactaacactggcaccatacaattaattcaactccagacggtattcaaatttcaccatttatttatttagcgacagagtctcactctgtcgcccaggctggagtgcagtggcgtgatcatagctcgctgcagccttgaactctcgaactcctgggctgaagcgatcctctcacctctcacctcagcctcccaagtcactgggactacaggcacgtgccattatgcttggctaattttcgattttattttattttttaagaaatgagggtcttgctatgttgcccaagctggtctcgaaactcctgggctcaagcgatcctccttcctcggcctcccaaagtgttgggatcacaagtgtgagccaccacacccagctgatttcacgagtttttgtatgcactctgtgcacgtgtgtgtgtgtgtgtgcaggggcggttaattgccattttgtcacagatgcagacttgtggatctcccacagtgaagatacagaactgcttcttgcccacaaagtgaactccttcctgccacccctttgaagtcacagtcaccaccactatcccctgccctccagcacactctccattcgggcagaattgtttggctgaatttttccccagaatcatcagctttggtggcctggacaacttcttccctcccctacccctttccctagcggtagcaggaaggctacagctagatgggggagctacagggtgtctgatgaggaaactcatgtggagagggagacggggcaggggatgggggcaggtggtgatttgaggtggaggctgaagtcctggtgaatccagggagtagagaggagtgaagggtcccccttgggaggcaaccgggtcgggatagggagagggagatggggacgatggtgatctctctctggagtccgagaaacccggattccagttcagcttctgccatttgctatctgagtggccctgtgcaagtggcttcaccttcctcggcctcagcttcctggtcctacagagggtttagcacagaggagaagctgggcggggtgtttgttgctgtccttgcggctcttaaggatcgggggtggatggaagacttctgctgctcccgccccactcagcccctctgtctgcccgcagctcagagcccgactgtggccgagacactgcatcctgccttctccggagtccagcagtacacaggtaggaggcagcccgcgtgcccgcgctgggccctggccccgcccccgcctagggccccgcccccagggcccgccccggacgtgtcgttcttctgtgcctagccgcgcctcctacctctggccccgcccctcagggcccacccttagccccttgtcctgtattcaaccccgggccctgttactggtcccaccccaccaccacctatacccgcaaacaggaccttcccttgtcctttaaggacagcgcttacccatggccttaccctctcatgttctgtgttggggagagggaattccccttgaccacgtctctagctctgacccaaccccagctctcggccctgccccttaccctccctcctgcagctcctagccccgcccctcacttcctgcctttactctgaccacgcctctctgataaagccccgcccctacctctggctctacttcttaaggcctggctgtgaccccgccctctgctgcggccccgccccttaactcatggtcctgcccacatagccctccatcaagtcacggccccgccccactcatgcccttcatcccagtcttgcccccgccctccactgtgaccccacccctcaagcaatggtcccgcccactctggactgtcctgtagccttggccccgccctctactgtggcccaacccctatacccctcccctcacgccatggggtccgcccccacccccccttccccgccccgtctcggtattggccctgccctccaccatggccccgcccctcaggcaatagcccctccccgtttcgtctgtgatcttggccccgccctctggcctggccccgcccccaaaccctccccacaaaggccatgatcacacccactcctgccttggccccaccctcttatggccccgccccctccccgcccagcggcccaggccgcccacgtggcctcacgcccctcctcgccctgtgtctcgctccggtctccgcagccatgtaccccaccgcggccatcacgcccatcgcgcacagcgtcccccagccgccgcccctcctgcagcagcagcagcgagaaggtgaggcggccgcaacctcccctgggcgccagccccgccctctgcccgccctgtccacctgcaggctccgtgtctggcccgggcctctgggacccgcggggctgagagtgcggcctgggggctggacaggccagagttgagtcccggtgcagccgctgacccctgggaatctccctctctgtttcctcctccgaaaagagaaccatgctcgccccgaccccgtaggaatagcagtgacttcctaccagccctctccagaaccaagagtgattctctggattttttggaaaggaaaccctttttgaggctggggcatggcacgatgaggtatcaggtaatgaggcctccccagtaaagccaaggctgtcgaaggagggagggattcgattctggagtctgacagtcagggttcaaatccatacagttcttgccatgtgcggtagatcccgcctgtaattacatagcgttttgggggccgaggtgggaggatcacttgagcccaggagtccaagaccagcctggcttagcaagaccccatgtctacaaaaaaattaaaaattggccaggtgtagtggtgtgcacctgtagtcccagctactcaggaggctggagcaggaggatcactgagcccaggaggtcaaggcttcagtgagctactatctccccactggactccagcctgggtgagagagcaagactccatctcaaaaaaaaaaaaaaaaaaaaaggccgggcacggtggctcacgcctgtaatcccagcactttgggaggccgaggcgggcggatcacaaggtcaggagatcgagaccatcctggctaacacggggaaaccctgtctctactaaaaaatagaaaaaattagctgggtgtggtggcgggcgcctgtggtcccagctactcgggaggctgaggcaggagaatggcatgaacccaggaggcggagcttgcagtgagccgagatcgcaccactgcactccagcctgggcgacagagcaagactccgtctcaaaaaaaaaaaaaaaaaaagaaaagaaaagaaaaaaatcccaagctggtaacaacccaagtgttcatcagcaggtaaatggataaataaattaggatggagctgcacgatggaacactatacagcagtgaaaaaggataagtagccaatactcacaacaacatggaataacttcacaggcagaatattgagtgaaagaagccagataaaaaagacttcacttaaatgaagttttaaaacagtaggccaatcgaggtggctcatgcctgtaatcctagcattttgggaggctaaggcaggtgaattgcctgagctcaggagttcaagaccagcctggccaacatggtgaaaccccatctctactaaaaatacaacaattagccgagcgtggtggcgtgtgtctgtaatcccagctattggggaggctgaggcagaagaatctcttgaaccaggaggcggaggttgcagtgagccaagattgcgccactgcacttcagcctgggcaacagagcgagactccatctcaaaaataaataagtaaattaaattaaaaaaataaaaacgaggaaagctggctgggtgcggtggctcacgcctgtaatccaacactttgggaggccacggcaggagggtcacttgagcccaggaggtcaaggctgcactgagccaagatcatgccactgcactgcagcctgggcaacagagggagaccctgtctcaaaacaacaaaacaacaacaaaatcaaaaatctttatcagtgacacgttaagagaaaagaaagatgggaacgtagtagaaatggtagcactgttttctccatgttatgtggtttagaaatgcatgagactacaataaataccgtgcttggccttggagaagacctagaatgtgcacgtggaaacggcatcgaaagggttgttgcatgtgactgtgaaacggtggagggagggttgtctgaaatcagacagatagcatgaccccggatggggaaggtgcagctcacagcacactgggggagctgtgggagggtgtgtggcatgcagcgtgtattttcttctgaaggtcagtgcagctggatgtgtttttcagcggtcgcccacagttttggtggggatgaagcagtgcacgaacaaatgcaaaattcaggttatgctcaaaattgttcagttacattggaacagacttacatttcaagaacaagcattggctgggtgcagtggctgacacctgtaatcccagcactttgggaggctgaggtgggcagattgcctgaggttgggagttcgagaccagcctggacaacatggcgaaaccctgtctctactaaaaatacaaaaattagccgggcgtggtgacgcatgcctgtaatcccagctactcaggaggctgaggcaggagaatctcttgaacctgggaagcagaggttgcgatgagccaagatcacgccattgcactccagcctgggcaacaaaagcaaaactccatctcaaaacaaacaaacaaacaaacaaaacaaaagaaaacaagctttggccaggtgcagtggctgacacctgtaatcccagcactttggcagggcaaggcagaaggatcgcttgaggccaggagttcaagaccagcctgggcaacatagtgagaccccatctctacaaaaaaattaaaagttagccaggcatggtggtgcgtgcctgtggtcccagctactcgggaggccaaagtggggggattgcttgaatctaggagttagaggctgcagtgagctatgattgtgccactgcaatccagcctgggtaacaaagagaccctgtccctttaaaaaaaaatccattgctggcaagcgcagggattcctcttgttgtggggtgggaatggaagaaggtcatttttaggtttgggattagcagcagacttgagggactgtttaaggcttcagatgaacaaggttttaaaggctattgttatttatagtttttatattagccatccatcagggatttggagaggggacaatttagaggattatttgtaacttaaaaataattatttatggttggtatattatgttgtagtttaattatctgtagttttaggatatctgggactggggaccagagaattatctttttatttcacctgattttgtttctgcatcatctgagttttgaaaattatccaaggtctggggagttatccctagctggggtttgagaaagggaaataataaaaaaaatttttttttggctagacgcagtggctcacccctgtaatcccatcaccttgggagtctgaggaaggaggatcggttgagcccaggagttccagattagcctgggcaacatagcgaaacctctacaaaaattagccaggctgggtgcaatggctcacgcctgtaatcccagcactttgggaggccaaggcgggcagatcacttgaggtcaggagtttgagcccagcctggccaacatggtgaaaccccatctgtactaaaaatacaaaaattatccgggcttggtggtgggcacctgtagtcccagctacttgggaggctgaggcaggagaattgcttgaatccaggaggcagaggttgcagtgagccgagatcgcaccactgcactccagcctgggcgacagagcgagactccatctcaaaaaaaaaaaaaaaaaaaaaaaaaaaaaaaaaattagcaacgcatggtggctgaacaccagagttttacaaatgagttttattttagagacattattattattattattgcaaagatattaccaagtttccttattctccacacccagctcatctgacttttgtaaatgatccagagtttgaagtttagggagggattttctggagggtggccttcctcggggttttcaggtatctggggtcagagattgagggttgatctgggctttggggagcaggggatcccctgggtcttgtcagttatctggagtctgaggaccattttggtgcggagtagccccgtgtgagatcgtacagtgcaggcaaggggtgggtgtgtcccgtctccctccccagcccgtggccaggccccttctttctgggtgtctgaggcacccctctcccgacagctggagaagccagatgcgggctccagacctgtgcccctcccccgggggggttcgcctcctctccttgggggctttatgtctttctctcccccacctgcaggtcccgagggctgtaacctgtttatctaccacctcccccaggagtttggagacacggagctgacgcagatgttcctacccttcggcaatatcatttcctccaaggtgtttatggatcgagctaccaaccagagcaagtgtttcggtgagtggccgccgacgccacccctccccatccacctccctcgcctgccccctgacagggaatgggagggttttggtcggcctcgggacagggctgtgctgaaataatcacaatcagaaccagcctgtggccgggcacagtggatcacgcctgtgatcccagcactttgtttgttttggtttgggtttcttttttttttttttttttgagacagagtctcgctctgtcgcccaggctggagtgcagtggtgcaatctcggctcactgcaagctctgcgtcccgggttcacgccattctcctgcctcagcctcctaagtagctgggactacaggcgcccgccaccacacccagctaattttttttttttttttaagtagagacggggtttcacagtgttagccaggaaggtctccatctcctgacctcgtgatctgcccgcctcggcctcccaaagtgctgggattacaggcatgatccactgcgcctggccaatcccagcactttgagaggctgaggtgggcggattgcttgagtccaggagttcaagaccagcctgggtaacataatgagaccccgtgtttacaaaagacaacctttttaattagctgagcttagtggcgtgtgcctgtagtcccaactactcaggaggctgaggtgtgaggaccccttgaacccaggagttcaagaccagcctgggcaacatagcaagaccccatttctacaaaaaatacaaaaaaaaaattagccaggcttggtggtgcacactggtagtctcagctacttgggagatggaggtgggacgatcccttgagtccgtgaggtcgaggctgcagtgagctatgatcacaccactgcattccagcccagacaacacagcaagaccctgtctcatacaaaaaaacaaaaatggccaggcgcagtggctcacacctgtagtcccagacctttgggaggctgaggtgggtggttcacgaggtcagaagatcgagacatcctggctaacacagtgaaacccccatctctactaaaaatacaaaaaaattagccgggcatggtggtgggtgcctgtaatcccagctacttaggagattgcagcaggagaatcactagaacccaggaggtggaggtggaggttgcagtgagccgagatcgtgccattgtactccagcctgggcaataaagcaagactccgactcaaaaaaaaaaaaaaaaaagaactgaggcctgaatgaggagcaccaggcatgggaaatctgggggaagagtgtcccaggcagagggaacagcccatgcaaagaccccgaggcaggacggcgcctgacatgttggaggagcagtgaggaggcccatgtggctggagcagagtgaggagggggagagagggaggagggggaacatggagaggggacaggggagggtgaccagggccttgtgagcctcagggaggacttccttgtacccaaagacagaggacattaaggctctgaaaagggctgcaatttgtccaaagtcacacagcaggaaagaggtagaagaacctggagtagaaccagactctttttttttgttttgttttttggctttttttgaggcagagcttcactcttgttgcccaggctggagtgcaattgcacgatctcagctcaccgcaatctctgcctcttgggttcaagtgattctcctgactcagcatcccgagtagctgggattacaggcacccgccatcacgtctggctaatttttgtatttttagtagaaatggggtttcaccatgttggccaggctggtcccaaactcccgacctcaggtgatccacccgcctcggcctcccaaagtgctggaattacagacgtgaaccaccacacccggccaaagaccagactgttaacctcacactgtcctgtttaaagggtcagcccttgactttgtttttttttttttttttgaaatggagtcttgtgccatcagtgcgatctcggctcactgcaagctccatctcccaggctcaagcgattctcctgcctcagcctcctgagtagctgggattacgggtggacactaccatgcgtagctaatttttgtatttttagtagagacggggtttgaccatgttggccaggctggtctcaaactcctgacctcaggtgatctgcccgtcttggcctcccaaggtgctgggattacaggcgtgagccaccacgcctggccatggggtggagtatttctgatggcctctggacagagactggagcagaggtactgacagagatggagagaaagagacagagatgagacagaaggagagggagaggaagaaaagactcaagctagagaacgagagaaagaggggaggggagagaaacagagacagttagctgggcatggtggtatgggcctgtggtcccagctactcaggaggctgaggcaggagcatctcttgagccaaggaggtcgaggctgcagtgagctgagattgcgccactgcactccagcctgggtgacagagtgagatcctgtccccactcccttctgcaaaaaaaagagagagacaaagttgtggacacacagtcagctggagacacagatcctggctggacagagggcttggaaggaggcaggcatcctcctgagggaaggtggggaaaaggtggccctccaggaccctcggaagccccacctggcccctataccagctgggaagtctcagcacagccgaccccaagataaggagtgagtgccccatcctcagaggtatacaagtccagaggtgtcagaacaaagccagggctgctgtgtgtcctccaccacaaacaccctggcctgtgcaggtgtgcacgcaggcctgctcaggaccccgtgagccgggaagccagggccacagcataggaacaagccgaggacacccgcagcgccaaccacggaggtccaccctggtttctgcaggcttcgtgagctttgataacccggccagcgcccaggcagccatccaggccatgaacggcttccagatcggcatgaagaggctcaaagtccagctgaagcggcccaaagacccgggacacccctactgaccgcgcccacagccgccctgaggctgtaggcatggcccaggtgagccgccaggcggccccacccccgcccaagccccccgtcttgtctgaaaccccctcccgcggcccacttcatgctccaaaccctccccaggtggggtgatgcttcaagaggctacaagaaacctccgggttgggttggcggggacagagctggatgtagacacccccgatccccctgtggttggggctggagcagagggtgggaatggggtagggactgaggtgagccagggcccagtgaggtcggttagggaatccttcccggagaaggctttgagggctgaatagaagttcacctgagaggccaggtttgctctgggggtgggggtgcggtggggagggggttctgtcctgtcctatgagtctgttttccctgctgaaaacccaacaccagacggaaatgccaagtgcccaccccagaccccaaaccctaaggttggaccccaactcggaaccaggagtggagcgtggaaggtggggacagtgctcagggcccagtccagttggcactgacagcttccagtgtccccgctccatttccactagttcccctgggacaagcggcccctcactgggtgtcattcctacccaatgagttgatggaaaagtgggattcgtgccccacccaccatcatgcaagaaaaacaagcaaaacgaaacccagactgtagtttgccatcagggcaaaccactttctcaacatttttttgtggggggatgaacagtaaaccttgtggggccactgtggaaacttaaccgtgggtctcaaaccttgatgagcctcatctgtaaaatgggttcaagaaagtcatctccccagagacggcggaaacggtccacctagggaacagagtggggcatcttttcgcagccgagcccagaacccatcacctaaagagttctggatgattcgttttgattttttttttttttaaatcaccatcgctgtcgtcatcagagtctcgcctagggcctggcacagagtagacgctcagttagaagctgtctggccttttcaccttctcccgggtcagcacacacagatttgggagtatttacctgcacagaacgcaccttcaggaactgccaaccagaagcaaaatccaaagctgctctctgcgatcccttcacttttaactctcagtctgcactttttttttttaactgagcatctattatgtgctaggcactgttccagtgctcggggacgcagctgtgaatgaacagaaacgggggatggaggacaggggagaaacccccttcacgggccttagatggcagggggtagggaaggagagacagaaaataaacagaaatatctgtccccagctgccagaggaggaggaaatgggcttggtgatggtgacattaagttctttgaaagctgggtttgttggcctctgaactctggcctttgtgggatctgttcttttggaaaagatgggagcccctgtgttcctagatcccagcctggccgggtggagtagggtggggaggtggtgtccacctgtgtggccccgttctcactccctaacgcccgtcccttctcccccaggtgaggggccttcccatcccaggagggttttctgcttccaaccgatccaggacttacccataaattccaaccgttctttggacaccagccctttcctcccctcttctccccttgccctgcccctctactggaggccacctggagtggcgaggggcctttggggtctgtcctggggcaggggcgggggtgggggaggctcctgaatcgtgggcagaagtgttcacacgccccccctgctttgggaaacgctctcgcttcttccccacaaaacttggtgacttccccaaactaaatcacaccttttcctatatatatatatatgcatatatatatagatctatagacagtatatatatattttgagtacggatcatgggaccaaacttttccgacttccttccatccgagtagagtgaccctgggccggtcactcagcgggggacacaggaagggctgaggttggcgggaccccgcgcaacacataccaggtgccccacccccacccccaccacctcctggctggcacatcccaccaggaacccgccaacacaacatacctccaggacttttggcaccccccaccaccaattctccagggccgttgggctctgccagcttcagtgtccctggtcccagctgcagcctccagaccccacctcgccccttcgtcccagagccctgccctccgggatggatataggtacaacagagacgctctggcctgcctcagcccttctctgctcccctgcccgagtcatagccttactcatgtgaccaatagcccttagctttccgtcggagggggggggcggacagggttggggggagcccccctgcccctcaccaccccctcccaaggccaggcagccattgtccctgccttcgaatcaccagcctcgaatttaaggtcttgtaaccaggattgccaagcgtagcggaagaccctacccggaccggccaagcacccctttaactggagacgaacttgataatgaccttcatacctctacagagatttttttttttttccggtctttctgagcaggtacaaagaagaaaagagaagaaaaagatggggggaaaaaatcaaaccacaatggatttttgtttcctagttgggagtggggtggggtggggtgtctttgtgagggtgcctctgtacagctgcccaatccgcgacacccacgtcaaagcacagcatcaagttcgtttggacatccggcaaggcctcttaccaaatgaggcgccagataacttaataagctcaaaagaaaaaaacatttaaaaagaaagaaaaaaaaaaaaaaaaaaaccaagcatttccttttctttctaccaaaatgtgttgactgacccggagggggggcggtagggtgggggaaaccacacagaaaaaaaaaaaaaaaaaaaaaagaaaagaaaaaagaaaaaaaaatagaaaagaaaaaaaaaaatcttctgaaccaacttgtttcgatattccagagtttgataattgtttcgagactctcctctagcgtgcctgtgttccgtgtgtccccgtgtgcaagcgtgtgccatgccaatctgcctcgagggggcctcacccgtgtccgcggcgcccgccgaggcccccgagggcctgcttgggagtgtgtgccggtgtgcagttgtacgtgtctttctggtccatgtttactggctgtaaataccatttttatactccacatcgcagacctgcgtgatttgtacaatgtactttatttctgctacgagtaatttcatgaagtttcaacttgcaaactgacttttgggacaaaccaacacacacacagaagagaaagcaaagaacttggaactttgggttgactcggtttgagttttgtgtcaaagaagatttcccgcggctgaagaggttggtgttcctgttacgtgtttcaggtgagaagcagcaaagcgtcttaatgttcaaaacgcctctctttggtctggagaaaaaaaaaaaaaaaaaaaaacaactaaaaatttatttaataaaagttttacttgctaaagggctgactcttctctttctttcctctctctgtcatccacacagaccaagtgtatctggccccatccagcacctgggctggagagaaatgcaggtttagggtgaggggttgaaggaggggatattcagagaaaccaaatgtagatatagataccaggggccaggcgtggtggctcaaacctgtaatcctagcactttgggaggccgaggcaggtggatcgcctgaggttgagagttcgagaccagcctggccaacatggtgaaaccccacctctactaaaaatacaaaaaaaaaaaataacaaaaaaattagccaggcttggtggcacacacctgtaatcccagctactcgggaggctgatgtatgagaatcacttgaacccaggagttagagtttgcagtgagctgacatcgcatccctgcactccagcctgggtgacagagtgagactctgtctcaaaaaaaaaaaaaaaaaaaagttaccagctctaatgatcgggtatctgggatctgtctgctgaagccagatgcatttcttgatcatattacagctgtttgtttgtttgtttgtttgagatggagtcttgctctgtcgcccaggctggagtgcagtggcatgatctcagctcactgcagccttaacctcctgggctcaagcaattctcctgtctcagcctgagtagctgggactacaggcacataccaccacagccggctaatttttatattttttgtagagatggagtctcactatggtgcccaagctggtctcgaacttctgggctcaagtgatctggcctctgcctcccaaagcactggaattacagatgtgaaccgccgcccacagccagcagttgtttaactaagatcgctctggtctctgtcctcatggagatagtccagtggggcagagagatactatagaataaactatacaattttgaaaaaatgcaggtaaagttcacataacagaatttaccattttatttattgttttgttttgtttaaacagggtctcactctgttgcccgggctggagtgcagtggtacgatcttggctaactgcaatctccacctcctgggttcaaacgattctcctacatcagcctcccgagtagctgggattacaggtgagcgccaccacacctggctaatttttgtatttttagtagacatggggtttcgccatgttggccaggctggtcttgaactcctggcctcaagtgatccacccacctcggcctcccaaagtgctgaggttacaggcttgagccactgtgcccagccagcatttaccattttacccatttaaaagtgtgcacttcagtggtttgtagtgcattcacggtgtgttgccactaccacctctaattccagaacagcctatcaccccaaaagacatcctgtccccatcagccatcactccctacccccttccccaccccccagcacccacgcatccccttcctgtctctgtgggtccacctgtcctggacatttcatagaaatgggatcacacggctgggtgtggtacctcacgcctgtaacctcagcactttgggaggctgaggcgggtggatcacctgaggtcaggagttcaagaccagcctgaccaacatggagaaatcccgcctctactaaaaatataaaattagccgggcgtggtggtgcatgcctgtaatgtcagctacttgggaggctgaggcaggagaatcacttgaacctgggaggtggcggttgcagtgagccgagatcatgccattgcactccagcctgggcaagaagagcgaaactgtgtaactccatctcaaaaagaaagaaagagagaaagaaagaaatagagagagaaggaaggaaggaaaggaaggaaaggaaaggaaaggaaagaaagaaagagagagaaggaaggaaggaaaggaaggaaaggaaaggaagaaaggaaagaaagaaatagaaggaaggaaggaaaggaagaaaggaaagaaagagaaagaagaaagagagaaaaagaaaggaaagaaagaggaagaaagaaggaaagaaaaagaaaagaaagagaaataagaaagaaagatgggctcacacactgcgtggcctttcgtgtctggcttctctcactgagcacgaggtcctcacagttcatccacgctgtggcctgggtcagaggctccttccttttcatggctaagtaatattccagtgtgtggatggaccatgctgtcctgatccatccttcagtagatacctgggttgcctccatgtcttggctattatgagcctgctgctctgagcttcatggacaggtccctgcatggatgtgtgtgtttttagttctcctgggtagacacttaggcgtggaattcctgggtcaaatggtggctccatgtttgacctttgtgagaaattgccaaataattcttcctcctcttcttcctcctcctcttcttcttcttcttcttcttcttcttcttcttcttcttcttcttcttcttcttcttcttctttcttcttcttcttcttcctcttcctcttctttttcttcttcttcttcttcttctttctcctcctccttctccttctccttctccttccccttcccttccccttctccttctccttttcttcttctttcttcttcctcttcttttttttgagatggagtcttgctctgtcgcccaggcttgagtccaggggcacaatctcagctcatggcaacctccgcctcccgggttcaagcgattctcctgcctcagcctcccgagtagctgggattacacgcacacgccaccacacccagctaatttttgtatttagtagagactgggttttgccatgttggccaggctggtcttgaactcctgacctcaggtgatctgcccaccttggcctcccaaattgctgggattacaggtgtgagccaccacgcccagccgccgaactgtttttcacagcggcattttcaccattttacattcccacgcactgttcatgagggttccgattggtccacaccttcacccacagttgctacacaatagattgattgattgattgattgattgattgattagagacagggtcttgctctactgcccaggctggagtgcagtggcacaatcatagctctctgcagtctcgaactcctagggcttaagtgatctccctgcctcagtctcccgagtagctgggactacaggcatgcgccaccatcctccacaaaattttttacattttttttgtaaagacggggtcttgctgtgttgcatgttgaaccaggctgggcaccgaagctcatgcgtgtaatctcagccctttgggaggctgaggcgggaggattgcctgaacccaggagtttaagaccatatgggcaacaaagagagaccctgtctctacaaaaaaaaatcaaacagactgggcgcagtggctcacgcctgtaatcccgcagtttgggaggctgaggtgggcagatcatgaggtaaggagtttgagaccagcctggccaacatgatgaaaccctgtctctactaaaaaaatacaaaaattagctgggcattgtgtcaggagcctgtaatcccagctacctgggaggccgaggcaggaaaatcgtttgaacccgggaggcggaggttgcagtgagccgagattgcatcatagcactccagcctgggccacagggcaaggctccaactcgaaaaaaaaaaaaaatcaaacaattagccaggtgtggtggtgcatgcctatggtcccagcttttcagaaggttgagacatgaggatcgcttgagcccaggaggtcaaggctgcagtgagctatgatcacgccactgcactccagcctgggcaacagagcaagatcctgtcaaaaaaaaaaaaaaaaaaaaagaatgttcaatcatataacactggtttaagcattttatgttttattttttgggtttttttttttttttttttttgagatggagtctcgctctgtcacccaggctggagtgcagtgacgtgatctcagctcactgcaagctccgtttcccaggttcacgccattctcctgcctcagcctcccgagtagctgggactacaggtgcccacgaccatgcccggctaatttttttgtatttttagtagagatggggtttcaccatgttggccaggatggtctccatctcctgacctcgtgatccactcgccttggcctcccaaagtgctgggattatgggcgtgagccaccgcacccggcaggggtttttttctgtttttttttttttttttttttttttttttttttttttttttaagacagagtctcgctctgtcacccaggctagagtgcagtgacacaatcttggctcactgcaacctccaactccctgcaacctctgcctcccgggttcaagcaaccctcctgcctcagcctcctgagtagctggaattacaggcgcctgccactgcacccagctaatttttgtatttttagtagagacggggtttcatcatgttggctaggctagtctcaaactcctgacctcagatgatccattggccttggtgtctcaaagtgctgggattacaggcatgagccaccacactcagcctggtttaagcattttatatgactcaactcatttaacccgccccaactccctgaggtatgttctgttaatagtatccccactttacaagttaattaaagcccagaaaggttaagggacctgcctgaggctgcacagcagtacttgaaccctggctctctggcattctcttagctgctgtgtagtggcccaaaatcaaatgtattagattagaattcaggttattgtttgaaataggccaatttaagcttttaaaatttaacccaatgttgttaaacatttagaatgtgcacccttaaaaatacaccaattctgggcacagtggctcacgcctgtaatcccagcactttgggaggccaaggcaggcagatcacttgaggtcaggaggttcgagaccagtctggccaaacatggtgaaaccccatctctattaaaaatataaaaattagctgggcacggtggctcacacctgtaatcccagcactttgggaggctgacacgggtggatcatgaggtcaggagatcgcgaccatcctggctaacacggtgaaaccctgtctctaccaaaaatacaaaaattggccgggcgtggtggcaggtgactgtagtcccagctactcgggaggctgaggcaggagaatggcgtgaacctgggaggcggagcttgcagtgagctgagatcatgccactgcacttcagcctgggtgacacagcaagactccatctcaaaaaataaataaataagtaagccaggcatggtggtgggcacctgtaatcccagctacttgggaggctgaggcaggagaatctcttgcacctgtgaggtggagtttgcattgagccaagattgtgccattgcactccagcctggacaacagagcaagactccatctcaaataaataaataaatattaaaaaataaaaataaaatacaccaattccgccactgagtgtctccttaagaatgagcaaggatgtgcttaggacagaggaacactagctatgctataagtgctcatctgaggcataggctaagtgacatgcagggtgcattagttaggtgttgctgcataacaatttacccatcccccagtctgtcagcttaaaacatacattattatctgacctacaccatttctgttgatcaggagtccaggactgatttagctgggtggttctggctcagggtctcatgagattgcaaactgtcagcagccaagtctgtcacatctgaaggttcgactggggctggaggagccactcctactctggctccctcatgtggctgttggtgggaggcctcagctctttgccacgtgtgaatctccatagtgctacttgagcatccttacaacatggtggctggtttttcctggagtgtgatccaaaagagagagacagagagagagagactgcactgactttttgtttgtttgttttgagacagggtctcgctctgttgcccaggctgaagtgcagtggcaccatcctagctcagtccagtcttgaaatcctgggctcaagagatccctctgagtagctgggtctacaaatgtgtgcgtcaccatgcccagtttattattttactttttggagtggcggggtctcactctattgcccaggctggtctcgaactcctgggctcaagcaagcctccccgctgggcctcccaaagtgctgggattacaggcgtgagccactgtgcccactgcaaacatttactcttcacaactctggtagcttccttttccccagagcatgctacagccacacagtaaagccttacgtctattgagcacctgctatgtgcagcttgtgatcaactctttttgtcctcaccacaaccaaccaacaacgtaggtttctattataattctcactttgccgatgagaaaacggaggggcaggtttgtggagaggaaaacccaaggccacacagttggtatgtggtggagccaggatttgaaactgcgacccgttaactcctgcctcggttcccctcccttctcattcactgcagggatcacagttataaccccctgcttatgtatgcgctggcttgtttgatgtctgtctacccaacataacctggcgggtttcatgacaggatggtatgagtgcacagtaagtgtgtttggctttgttttaatgttatggggttttttttttttaattatttacttattttgaaagagagtctcactctgtcacccaggctggagtgcagtggtgcggtatcagttcactgccacctccacctgttgggttcaagcaattctgctgcctaagcctcccgagtagctgaaaatacaggcatgggtcaccatgcccagctaatttttgtgtgtgtatgtgtgtgtgtgtgtgtgtgtgtgtgtgtgtgtgtgtatttttagtagagatggagtttccccatgttggccagattggtctcgaacccctgacctcagctgatccacccgcctcagcctcccaaatgctggaattacaggcttgagccgccacgcccagcctgtttttatgttgagacagggtctccctctgtcactcaggctggaatgcagtggcacaatcatagctcactgaagtctccaactccggggctcaagcaatcttcctgcttcagcctcccaagtacctgggactacagatgcataccatcacacctggctaatttttttcagtattttttgtagagacggggactagttatgttgcccaggctggtctcaaactcctgggctcaagcgatcctcctgccttggcctcccaaagtgctgggattacaggcatgagcccttacacctggctgaattttgtttttctgttccctgttgcctagcacatgatacctgcttaccattaataaatgcactaaaaacacaatggttgagtttagaaccagactgtcccaggtttgaaaccggtttataacattgaatggctgtgtgtccttgagccagcagctgaatcctctggggaccagtttttctctctctctctggaaaacgaggccaatccagctcacaaagcgttaatatgtataaagtccttcctggcccggagaaagcactgcagaagctttaaaataaatcagcccttaaaaattcactttccggctgggtgcggtggctcacgcctgtaatcccagcactttgggaggccaaagcgggcggatcacttgagatcaggagttcgagaccagcctggacaaaatggcaacccccccctccaactctactaaaaatgcaaaaattagccgggtgtggtggtgcgcacctgtaatctcagctactcgagaggctgaggcaggagaatcgcttgaacccgggaggcggcggttgcagtgagccgagttcccgccactgcactccagcttgggcgacagaatgagacttttttttaaaattactttccggatgctttcgctccagcgaccagcagggggcagcaaaaacccatgccttctttcaggctctgtgccttggcttgaaatgtgcaagatttattgagctcggagggagactgtgaggggactccctggcttctctcctgggacgcaaaagttgccccgtgcaaactttctagcctgcaaggtcggccccgctcctcctccccttttctctccagtaactgaatgtggtttggctgccaggcctttgcacgtgcggtttccctagcctggaacactctgttcccaccctggaggtcggagatgctgggttgggatggagacacccgtgacctgctaggcccagggcatggcgttagcaaaggtgggggtagaagtaggaattactggccgggcgcggtggctcacgcctgtaatcccagcacttcgggaggccgaggtgagtggatcacctgaggacgggagttcgagactagccagaccaacatggagaaaccccgtctctactgaaaatacaaaattagtcgggtgtggtggtgcatgcctgtaatcccagctactaaggaggctgaggccggagaatcgcttgaacctgggaggcggaggttgcggtgagccgagattgcgccactgcactccagcctgggcgacaagagtgaaacgccgtctaaaaaaaaaaaaaaaaaaaaaaaaaaaaagtaggaattacctaggtccgagttagaaaacagagagcccctcaactgtggcctcgaaaccacacagaggactgaagcaggatgtgtgggggtaaaactgagggccaaataggagctgagtcccgaccaagggagctggagttcctcacctctgggtcctcaatatttgctgattgacttaagacatgcatgcccttaagccttgcattctctctccaagcttcagtttcctcatctgtaagacggggctcatgagatatatatatatatatgtgtgtgtgtgtgtgtgtgtgtatatatatatatacacatacatatgtgtgtatatacatataatgtatatgtgtgtatatatgtatatatacgtgtgtatgtgtgtgtgtgtgtgtatacacataatttttggttggttgtttgagacggagtctcactctgtcacccaggctggagtgcagtggcgcgatctcagttcactgcaacctccgcctcccaggttcaagagattctgctgcctcagcctcccgagtagctgggattacaggtgcgcgccaccacacccggctaatttttgtatttttaatagagacagggtttcaccatattggtcaggctggtctcgaatccctgacctcttgatccgcccgcctcggccttcctgatccaaccgcctcggcctcccaaagtgctgggattacaggcgtgagccaccacgcccggcctgggctcaggttattatgcaaacatccagaactgggcagatcaagatgaatgataccaatgatactatcacattataggcaaaataggaccttctccccggtcagaaaagtgaactctcaggcatcactcctactggaatccagagtcaataaacatttatgaagcacctactgggtactaggagctgttgtagaaaggtactggggagaaggcagggaacgaaatgtacaaaaattctgaccacgtccatagtccctggccccgccccactacttgccccaaccctcacaggaacagtttccagccccgcccccagccccgcctcctctccaccccctcacttttctgaacctaccagagcgaggtgaagggtgagagtaatctacatattcatgagggatcagccaatccacagcctgaactcggatttgtcttcagagcctagctgattgtgacgtcaagagtgatgcattacgtagccgggcgccgtggctcatgcctgtaatcccagcactttgggaagccgcggagggcagatcacccgaggtcaggagttcaagatcagcctggccaatatggtgaaaccccgtctctactaaaaatacaaaaattagccgggtgtggtggcgagtgcctgtaatcccaactactcaggaggctgaggcaggaggatcgcttgaatccagaaggcggaggtggcagtgagtggagatcgtgccactgcactccagcctgggccacagagccagactccgtctcaaaaaaaataataataataataaagtgatgcattgcgtgatttttaaaggtgcagcaacctctcatggtctcagtttgcatatccgtaaagtacaggttggggcgtgcgggacatagaaaccagcgcagtacgatgacgctgaaatcgctttgccaccttgggtgaaattcagggatacgttttgagcgttcactacatgtcagacactttactccagcgggggctccggagttcctgcttagaatgggagcttcagcaccgggggtcgcggacagctcccggctctggtcgcaggggctcccatgcaggatgactggggacaagggtctgagctttctctgcctgtctgtcctccatcaaagcctcaaatgaactcagccctaatctctgacagctaaggggttgctagtcaggacaacactctgtccttggtccccaatcctgctcctccctcgtcgtctgcatctcagctgatggcagttccattctttttttttttttttttgagacggagtctcgctctgtcgcccaggctagagtgcagtggcgcgatctcggctcactgcaagctccgcctcccgggttcacaccattctcctgcctcagcctcccgagtagctgggactacaggtgcctgccaccacgcctggctaattttttgtatttttagtagagacggggtttcaccgtgttagccaggatggtctcgatctcctgacctcgtgatccgcctgcctcggccgcccaaagtgctgggattataggcgtgagccaccgcgcccggcccggcagttccattcttccgggtgctggagccgaatatcaacgctatcctggatcttttgtttcttgctcaactccaatctatcagcaggtcctgtcgcccctgccctcactattccatcctcaaacgctcacttcttcctgttcctctgcctgggtccagccccatcgttgcccacctggacctggcgcagttgcctctgccttggtcctaggctccaccctctgccacacagtctgtcctccctgcagcagccaccagaggggggctgtgagcacccgagttagggcctgtccctcctctgcctacagcactccaaggctcccaccttcctctgggtcaaagcctccctgtgacctataaggctggcaagaccttccctgtgttagccaggatggtctcgatctcctaacctcgtgatctgcctgcctcagcctcccaaagtgctgggattacaggcgtgagccaccacgcccagccaattttctgcattttgaatatatgtctgggtatgtctcttagaggatatttattctgtttggtgttttctgagcctcatggatctgtgaaaattattggctattctctgaaaacaatcagctgccctagtcttccttctcctgtgggattccaattacacctgtgttagatcacttgctcttcacctgcagctcttggatgctcttaacctgtctttaacacctctctaattcttgcttttctttttttacaaacagagcaggcttcaggcttgatgtttggttagactatgataaggttgaggaggtttttgttgcatttatctttggacctgccctcaattcacggcagactgtagtgcgggggaggcgttattcttttctctttaaatatatctaagtcttttaaaacaaacagtttgatccaaagaaaaatcttcactaatacttggacacagataaaacgagaagggtggtctgtgagtgacagcattgagaggctgccctaatctggcttgttggtttttcagctagggaaactgaggcatggagtgggtaaagacttgtagaccaggccgggtgtggtggctcacacctgtaatcccagcactctgggaggccgaggcaagtggatcacctgaggtcaggagtttgagaccagcctggccaacatggcgaaaccccatctctactgaaaatacaaaattagccgggcgtggcagcaggtgcctgtaatcccagctacttgggaggctgaggcaggagaattgtttgaacctgggaggtggagggtgcggtgagctgagatcgcaccattgcactccagcctaggcatcaagagtgaaactccatctaaaaaacaaaaaaagacgtgtagacctgggccttctgtccttggtacggggggacaggaaccggggttgggggtgtggtgcagatggaggatcctcacgaagatccaggtgctggcccagcgcagcagctgctgcagttttgatcactgggctgaccctcttgggcctcagttctcagagtggaaaatgtggctggtcaatcgggtgtctctggtgggggcataggctgtgctacacagtggacggtccacagcccaccccgttgactgtgcacggctgggtggcttgtctttcccatctgtctttctcactgtctctctctctccctaactctctccctctctgtctcattatctctgtatctctgtctttctctatcactgtttccctctaaatcttgctgtctctccttgtctctgtatctttgtctctgtctctctcccctctatctctctctttcactctttctgcatgtctttgtgtgtctctgtctttccctgcctctctgttcatgtctgtttctctgcctctcatctctgtctttttccgtgatgtctctctgtttctttctcttcctccctctctctccctttctgtctcttctctctatccctctctctctcttcctccctctctccctttctccctctccctctttccttcttccccctccctccctccatccctctctccctccctccatctctctctcctcccttctctctctccctccctccatccctctctccctccctccatctctctctctccctccctccctccctgtctccatgtctcttcctctctctccatctctcattctctctccccttctccctccctcctttcatctctctctccccttccctccctccctctctctccccctccctctctttatctctctctccctctctccatctccctctctttctctctccctccctccctccatctctctctccctctttccatctctctctccatctctgtctcatctctctccatctctccatctctccatttctccatctatctctccatctctctatctccatctctctcttcatctctctctccatctctctatctgcctctgcatctctccatctatctccatctctctcttcttctctctctccatctctccatctctctctccatctctccatctctctatctccgtctctgtcttcatctctccatctctctccatctctgtcaatctctctctccatctctctccatctctctctcattctctttcccccttctccctccctcctttcatctctctctccccttccctccctccctctctcttcccctccctccctttatctctctctccctctctccatctctctgtctctcattctgtctccctccctccctccatctctccctccctccctctctccctccctctctccatctctccttccctctctccctccctctctccatctctctctccctctttccatctctctttccatctctctctctccatttctccatctctctctccatcactctctctccatttctccatctctctctccatcactctctcattctctctcccccttctccctccctcctttcatctctctctccccttccctccctccctctctccccctccctccctttatctctgtctctccctctctgtcattctctctccctccctctctccatctctctctctccctctctccatctctctctccatctctccatctctccctctatctccctgtctccatctctccatctccctctccatatctctctctctctctctctctctctctctctctctctctctctccctctctccatctctctctccatctctccatctctccctctatctccctgtctccatctctccatctccctctccatatctctctctctctctctctctctctctctctctctctctctctctcccttcccgtttgaaggttgcctcccacatctgccttccgccaaggcccgggctctgacccgccgtctgaatgcctgactccaaccgcacatctgtggggtaattgtctcctacgaccacaaggtactgaggcaaattatagttacggggcgggggcctccatgtgggcgaactgcgtccgctgggccgggctctgccggcctcagctgggcaggatgaccgaggcatggccccactagggtcaggaaagctcacgcccagcccttcccctcgcccctccccacacaccagccagtcctttgccaggcctccatctttagtgccaggatgaaaatgccttttgcaaaaatcagcaggaaactccaatatttgcaaaaccctgactttctattcatgcatacattcctgcattcaacagatctgttacggagcgcctactctgagccaggcactgttccaggcactgaggccaaagcagtgaatgagaccaacacaattctcggccctcctgaaatcaacaccccactgggggagacaggcaagaaatagggaatagtcatcagtgctttgaagaaaaagcaggaaagtgatcttgggggcccaggggagttattttattttattttattttatttattttattttatttatttgagacggagtctcactctgtcgctaggctggagtgcaatggcgcgatctcgggtccctgcaacctccgcctcctgggttcaagtgattctcctgcctcagcctcctgagtagctgggattacagatgcatgccaccacacccagccaagttttgtattattagtagacacgggtttcaccatattggccaggttggtctctgtctcttgacctcgtgatccgcctgtcttggcctcccaaagtactgggattacaggcttgagttaccacgcccagctattttattttatttttattttgagacagagtctcgctctgtcacccagggtggagtgcagtggcacgatcttggctcactgcaacctctgcctcctggattcaaacaatcctcctgcctcagcctcccgactagctgggattacaggcgtgcaccaccacgtccggctaatttttgtatttttagtagagatggggttttgccatgttggccaggctggtctcgaactcctggcctcaaaggacccacccgcctcggcctcccaaagtgctgggattacaggtgtgagccactgcacccggccaagccattgctattaatatcgatgattcaaatgatagggtctctcccatacacctgccctgtcaagcatcataggtgcttactgtgtgcacagctgagtcccaggggatgccggggtcccggtgagggttcagacccgggccctgccctccaggagccccccaggctgggggaggctgtactggatgcagacaatctcaatcccttggggttaaggctgggtcttgtgggaaccttcctatcgagcagaatgtggctgctaatccaggcttttcagggtggaaactcagagcctgtggtccagacagtgggcgtggcgtggctgggtgtctcgccttcctctctctgtctctctccaaccttctccccatctctgtccctccatttgtctctgtgtctgtttgcctttgtctctgtcctcaagggttggggcaatgtctgggctgggttttgacagatgcataggagttgctcagcggtgcaaagaggaaaggcatcccaggcagaagcaaaggcccggagctgtagaagaacgtggtgtcatcaggaagtgggacggtgacatgcattagtgagagaagggggatgagtgggaagccgggtccagtcgccgtcgggttcttatgttggagaccatgaagggaggccaagagaggagggaaccagccacagctgcactttaggaagattcctccacggtgccggggactgagcagaggagacgagactggggtggccacgttccccagcacgccaccccgtcctcagccccaatgacacagcgaggcgcctggtccccattcatgtcctgcgccagctgctcagcctccacttccctccgagcactcggagaggacacagaaaagcagaggccagaggagttccgggtgggccctgtcattgccatgtcagagctaaggggcagtccctccccagggaagttcttcctgcagtctatctgcagtccctcctgctacctgcgggccaggacatccagcccccacatacacaccagtgaccagccccttctcgcctcacccgggcatacacttcatgctccataaatgcacagcgactgttacattatgaaacaaaaggaacccccccaccccctaccacccaaaccccccaacttgtctctgcttggaggccaggagaaggaaggagaagataaaatagtgacagtcacgccgggagcagtggctcgcgcctgtagtcccagcactttgggaggccgaggcgggcagatcacctgaggtcaggagtttgagaccagcctggccaacatggcaaaactccatctctactaaaaatacaaaaattagccaggtgtggtggccaggtgcctgtaatcccagctacccgggaggctgtggcaggagaattgcttgaacctgagaggcggaggttgcagtgagccgagattgcgccactgcactccagcctgggcaacaagagtgaaactctgtctcaaaaaaaaaaaaaaaagacttacccctccagggtcccatgaagacagccgagccctgcccggagctaacggaggccttggagcacgctcacaggggcaccctcccggctggcatctgggaagcggaggtgggtgggtgttgcgggggggggggtcggtgggggggggcgttccccctcccgccccaggctgccgggtcctgcgcatccgtctgtccctgatggaggtggtgggcaggcgggagaagccacgctccttccggggggcgggaggggggattttccaatcagagtttgagcttcattcacaaatccatggccccgtctgattgcaccaacggctgctgcacacacacacacacacacacacacacacacacacacacggcctgtgacagcctcgccgggctgtgggtggtcacttagttgagagtggcctggtgtgtctcacattaacgcatcccaagccctcctgcctctctctcttctctcttctctcctctctctctgtctctctttctctctctctctctctctctcactctctcgtctatgctctccagctcccagtgtccccggcaccctcctccgactccccagagaaaagctgcttgtgtgacggcatcatggaagccgggtgcccggacctgcctcccaggcggccggcccagcccgcactccggtccccataaggcgattcggggccgccctcgccgtccgccccagcatggaggtgcccgggccccccgtgtccagcaagccgggagagacctcggtcaaatggcaactgtgctacgacacgacggctaaaatgtggtggatggtgagtggagcggggcccgccgtggcccggggccgggggcaggagggggcggccggccgaggaggcttctccagccaggcgtggttggggggcggcggtgacccccccactggggagctgtgaagtcggggaaggtggtcagaggtggtgaaaccgagcccagatcatggagagcagaataattcttgcatcttccacctggagacgagtccgcggctgcccaggcaccgctaagggcccgaaagtgcctgtttctgtggcccacgagggcaccagggtggccgttcccttggacggttttgcagaggatcagtggtcctggagatgcttgtgctgggcccagggcctgtgatgggatgttctgagggtggggaggtctcagcgggctggggagcgtgaggcccagggactgggctgctgtgtgaccccggccaagccctcgcctgcctctgtgccctgtggtcccagaaaacggggtggacaccctcctcgctctggctggatgatggccaagggccgagggaaggtggggtggggctgtcgcctgctttggcccagaggaggactatggcatcacccctaagattgggcacccttccggaagcttccagtggtggtggtggggggtggttaaggccacgtcccttgaaactgggacccaccggatggggtaagaagcaattccggggcagctctgtgtgtaagacagggcacagttatggagcctggctgggggccagtgtccacggcccttggggtccgcgcgagaccgtcacactgtccgcctctcagtccgtcggtccatccagctgtctgggagctggccggtgatccatggggaacttgaaaacccgtcaacacaggtctgcatcatgcagatgtgtgtttcaacctgggcttactgtgtgaccttgggacagtggctcaccctctctggcccgcaggttctcccatcagggaaatgatgagcggcctagacttctcgggtttcatggcaggtgctctgtgggtcgccaaggaaagttgggcctcgaggtgggacatggcacctcatgacctgctgtgacctctcatagctgctgtctctggggtgtgtctgcttcaggtggggtcagagcctctggggtcatttccttagtctctgagcaccaaagtcttggggtttacaaggacagagagacctttcccacagccctggggagtgtcctgcattggtttcacttttcattcttcatacaaccaacatttgagtactcgctgtaccccaggccccatttctccatacgggggacacagcagtgacccagacaggaaaaaaaaagtccctgccttcttggggcaaatgtcccagagcgggagacagaggataaaaatatctgtgcacaaagtaggagtgaactacgattgtaggaggaagcagtgagaaggcgctgggggcctgagtgagcccaggcaatctgggagggctttcctgaggaggtgacatctgacctgagacctggtggatgacagaattcattcagataagagaaatgggaatagagttccaggcatgggtcgtggcatgtggaaaggccctggggcaggaccacatctggcctgttggaggaacagcgaggaggcctgtgtggctggaccagagtgaggagggggagaaagggaggaggagagggcagggaagggacggggcaggtcacgcagacctgatggcctctgggaggacttgggctgtgacaccgaggaaggtgggagccatggagggctgcgggcagaggagggacgggacctattttatatttttaaagcttccttgggcttctgtggggagaaagggtggctggggctgatgtggcagccagagaccaggggaggctgaggcggcttctaggcgagggatgatggggacttggaggtgcagggaagggagcaggtttcagatgaaaaaaggctgggacttggcaattaaactgaaggcccagagaagctgagtgatttgctcaaagtcacccagcaagtgaagaacagagctgggagtgggagaagggcctgaggtcagaggtcagaggtgggggaggtggggagcccttcctcatctccatctcctgggtccttagcgagccaagcagaactggcagtttgagaaaaggagaacatttcagtgcaaacttgaggtcttatcaatagaggtagaagccccagtataggggaggttatggacccactcattagtcaaggggaggtatcaaaccggagtatgtccagacagggaaagcggatagggcagccttcagggaaagactgagagactcagggctttagcccaagaaaagaagatgcctaggggtggaattcagttcagctctccaagctctccctgacatttctctggcattggctcagagctgggtcacctgcgccctcccacaggatcaaccacacattcagggggttcccaaacacaagagctgaagcagcaggacccaagattcaggactcaaaatctccctaggcggggcttccctagggcagaagaagctaaagagggcagagggcagagcctggcctctgcagggatcagcttgacctctgtaagtgctttctcctgagtgtgtgaaaggtaatgaggcatccgtcacaggaggcatgcaagcctctgttggtggaaattccattcttttttttttctttttgagatgaagtatcactctgttgcccaggctgtaatgcagtggcgcgatctcggcccactgcaacctccgcctcctgggttcaagcgattctcctgcctcagcctcccaagtagctgggattacaggcatgcaccaccatgcctggtgaatttttgtatttttagtagagacgaggtttcaccatgttgaccaggctggtcttgaactcctggcctcaggtgatctgcccccttggcctcccaaagtgccggtattgcaggcgtgagtcactgtacccagcctccattctttttttttttttttttttttttgagacggagttttgctcttttcatccaagctggagtgcaatggcacaatctcggctcaccgcaagctccgcctcccgggttcaagcaattctcctgcctcagcctcccaagtagctgggattacaggtgcacgccatcacgcccggctaattttttgtatttttagtagaaacagggtttcaccatgttagccagcacaccacaggctggtgtcgaactcctgacctggtgggctgagatgatcgcccacctcagcctcccaaagtactgggattacaggcgtgagtcactgcacccagccccagcctccattcttttaaatagagtggaccaggtgattttcaaaagatgcttttacactcagagcagccaggctcccaaggcgaatgaaggatccacgaaggattcaaaatgtggggctggatggagagagaggatactgggcgggcgttcaaccttagcctctaaatcccaaggcagagttaacatctcccagagctacaggaggcacagcacagggctcctgagacctttagggctcatggaaatatttccattttaatgtatcgtataactatgataataatgaatacatggttatgcatcccgtctggattctattcatctgtgtgcccatgcagccataaaagataaatttgtttgtttctttctgagacagagtctcgctctgtcacccaggctggagtgcagtggcacgatcttggcccactgtaatctctgtctcccaagttcaagcgattctcctgcctcagcctcccgagtagctgggattacgggcgcccgccaccacgcctgggtaaattttgtatttttagtagagatgggttctcgccatgttggccaggctggtcttgaactcctgacctcaggtgatccacccgcctcagtctcccaaagtgctgggattacaggcatgagccactgcacccagcccataaaagatcattttaaacaattctattttttgtgaaggaaagagcccacaaaaacaaaagttcccctggcctgggaaaatcataaggtagctaagttcatccatttatctgttcattcattccaagaacaagtcatggcagggcagtcgctcacaactttaatcctaacactttggaaggctgagatgggaggatcctttgagcccaggagttcaagaccagccggggcaacatgacgaaaccccatctctacaaaaaaatatgaaaattagtcaggcgtgatggtgcatgcatgtaatcccagctactcaggaggctgaggtgggaggatcgcctgaacccaggaggttgaggccatggtgagccatgattgtgccactgcactccagcctgggcaacggagtgaaaccctgtctctagaaacaaacagacaaacacacacacacacacacacacacacacagagaccaggcacggtggctcatgcctgtaatcctagcactttcagaggctgaggcaggtgaatcatgaggtcaggagttcaagaccagcctggccaacatggcgaaaccccgtcgctactaaaaatacaaaaattagccgggggtggtggtgggtgcctgtagtcccagctactcaggaggctgaggcaggagactcgcttgaacccaggaggcggaggttgcagtgagccgagatcccaccactgcactccagcctgggtgacagagcgaggctccatctcaaaaaagaagaaaaaaaaaaacagaaaaagaacaagtcacgtcagctctctgtgcctcagtttcctcatctgtaaagcaggcggaggtatgcacagcagagccccccttccccccagtagggtctttgtgggaaatccaatatgctgatgaccacggaggtatcttgcaaactgttaagggccctgcccaggtcaggaactgagtaatagtcacaaagataaagcgagagagattgtggttagattccagaaggacttccgtggtggctccacatgcgccatgagtgcctattacgagtccgcggtgaaccagagagacccagccctgcccttcctgggctcctggcccggcatggagaacagtaaaagagaaaatgaataatgcatgagataattttaaattgagaggaggacggtgaagaaattagaagaggcagccagtgggccgggaaggtgacgttgcggcctgagccatctcaagggacctaaagtcttggtgggggcagagggcatggcccgtgcaaaggccccgaggcaggactgggctggtgcgttagaggaatggccaggaggcccatgtggctggagcagagtgaggagggagagagagggagaaggggagggtagggaggggatgggcaggttgtgcagggcactgtggcctccggggtggatgtggtgtttgggaccagaaaccctagggagccatggagggttgtgggcagagagggcctcccccatccactgagtggttccctgtgcccatccgtgagtgccacccgccacctccccctctgtgtgcccggcgctggtggggggcctcgagatgcttcgtctccccagccccctggcccgcgcccgcccggccgccgcccactctgcccacatctgaggcgcctaggagccggacagtctgccgcaaaccacggaatgtttcccggagcgccgggccgggaatgtcggcggtgaggaggggaagggtggggagacccagagagatgggccggggcggtgggcaccgccacgcgagggacgcagaatcattgtcaccctcaaccccagagaggggccaccacgatgccgccgctttacagatggggaaactgaggcacggagtggcgaagcgactttctatgtccacagggcttgggagaggcagcgctgggattcgaacccagacttcctggccacagacctcaggggcttgcccactaacccacagcaaagaggtcagcgggaactcagtgaatgaataaatgaatgaatgaatgggttttgtaagtgagtgaatgaaggctcattcactccgcccagccaggcctcccaccccagccacagaccaagcagaacatgctgaaacacaccagcccccatcctccagttcccaccactcccactaccatctggaagtccctccttgtatccgacctaggtctttcctcactcttttcttctccagggcagataaatggcaaggcgttcacaccctcccctgcaagccgctgagtctgtccctccaggagaagggcagagcccagccactgctcaccctggaagtcactggggaagggacagttgaggctcagagaggggcagtactttccccaaggtcacacagcaaattcttgtaacgtcagagccctgaacgattcctgagatgacgcccaattagagtcatggccggctgagcctcccatgttgtatctccttcaatcctcccaacaagtcgatagggaaggaaccattattatcaccattttatagatggggaaactgaggcttggcaaggggcagccgctgcaggaggtggccgggaagcgaccagggtaatgtggccactctctggatcagctgagcagagggaccaacttgttactctgccacctgtgatgggggtgatatgaagccatggctgccaggggtcatatcacccaggtgtcgtgtgtctaccccagccacacgctaagtcctcatagctgcctggccacgtggtttcgcccacctttgcagctggtggctttgcaaggttccatgaaacccctagcagggcggaggcaccttgtcctttgatagaaacccactgggcagggagaagccactggctaggggctccctggagatggtgacatttgagccaggcccagagggatgctaaagctttcaacacaagaaggtagcagggagggcattcctggcagaaggaactgctcagacaaaggtgtggtggtgcgaatgtgcccccgtgtgacagagctaaaatggggcctgaggcgggggcaggtaagagagacatgtaaagccaggctgtgatgggtgggtctcaaatgcgaggctgcggaggtggggctttctctccagggtaatggggagccatgggaggtgtctgagcgaacaggaccagagggacagatgggagagaggatctaaggggagagtgagcagatgttgggatggacagactatggggagccaggaggagggagaagatggggctgatgccagagatccctacctcagggatggggagtgatggtggaattgtccctgacatggggacatggaaggaggagggggtttgaggaagacgctgagtctggagaccttgaggaaagtcctggaagaagctgaataagggagagagatcgctggagtctaagataatgactagaacatctgtgatcagtaactgcttgtgaattggatggagggagggagggaggagtcgataggtgggtgggttgatgggtggacagatggatgagtggatggctagatgaggggatagatgggtgggcaggtgggtgggtggatggatagatgagtagagtgatggatggatggatggatggatggatgggagggaggtggatggatggatggattgataagtggttggatggttggatggatggatgagtggatggatggatgagtggatgagtggatggatgagtggagagatgaatcaatggctggatggatggacggatggatggatgaatgggcaaacggatgggtaggtggatggttgcatggatgaatggatggatgaatgcatggatggatgggtgggtggatggatggatggatggatggatggatggatgggtggatgaatggaaggatggttgagtgtatggctgagtgagtgaatggatgagtggagagatgaatggatgggctgatggatggatgcaggcatgggtggatggacagacgaatgggcaaatggatgggtacatggatgcatggatgaacgaatgcatggatggatgggtggatggatggatgagtagagggatggatgggtggatgggtgaatggatgggaaggtggatggatagatggataaagggatgaagggagtggtggatagatggatggatggatggatggatgaatagagggaaggatgggtgaatggatgggaaggtggatggatagatggacaaagggatgaagggagtggtggacagatggatggatggatggatagagggatggatgggtggatgggtgaatggatgggaaggtggatagatagatggataaagggctgaagggagtggttgatagatggatggatggttggttggctgcatgtgtgggtggatcaatgggtaggtggagcctgaagacagaagtggctgccctgagtgtgaaggcaaaggcacagccctgggaagcccccacatcagggccaggaagaggagatttggggaggaagcaggaactgtgccagttgcccctgtaactgcctctctgtgaggcctccccacccaagtcctttcctctacccctcttccccagaaatggctttgggacttgaaatccccgccccccgccccacaccccaccacacacacacacatggctcagctctggggggcctaccgcagacaaatcagtggaaaattaaaatagtgcctgtgcactggtgatcggcggcttcagccgggcacttaatgatccctttctggggattgttaccagctggaggtggcgggggggtggggggtcttcaccagccacccaatctgagcagtagggggtggtccctgggagagggggtgcagcccacaaagccagaagttggcagtgatggcaaagctgggaagggcttaggcagggaaagggatgaccttgagctccggggatgaacccacttggacccctgcacccctgtggcccctgctgggacgtcctttctctctcagtttggctagatggctccagctcatcttgtagttctcaggtccaatgtcaccacctccaggaagccctcctggactaggtcaaatcccctcagaagtatctaaccatccttatctataatcctatttgcctggaggccttgagagcaaaacctcactttgccacattagctgtgtgtccttggggaagtcactttccccctctgtggcttgttttcctcatttgtaaaataaggctgttaggagaattttttttcttttttagagacaggatgtgactctgtcatccaggctggagtgcggtggcacgatcacagttcactgcagcctcaaattccctgggttcaagcgatcctcccacctcagcctcccaagtagctgagactacaagtgtatgccaccatgcttggctaattttttagtagagatgggaggtctcagtatgttgcccaggctggtctcgaactcctgacctcaagtgatcctcccgcctcggcctcccaaagggcggaattacaggcatgagccatctcgctgggcccctgttgggaggattaaatgaacaattgtgggtaaactggtatttactgagcctttattatgtactgggcacagggttgaatctggtcctcaaattctcaaaataagccaatcaatgccagcaagatgttcatccccattttagggagagagtcactgaggcccctaggaatgagataaattcacttaataccgtcactgtgtgcccggaccagttcagttccctctgctctcacccctcacagtctgtcctccccacagcagccaccagagggcgcctgtgagcacctggatcaggtcctgtccctcctctacctacaaccctccatggctcctacctccctcagggtcaaagcccaagtcctccccatggtccacatgacctgccccatcctctccctgccctcccttcttccctctcttcccactaactctctctgctgcagccacacgggcctccttgctgttcctccaacatgccaggcgtggtcctgccccagggcctttgcacaggctgtgccttctgctcaagatgcccttccacctccccttagacaaactggctgtgcctcctccatctggcctcaactcaaatggcatccagaacacccctcccccaactaaaggaggtcctcctgctgtagtgtctgacccagccccattcttgtgaatgtaacagacacacacacacacacacacacacacacacacacacacacacacacacacactgcagtcatgctgtatgtgacttggcaggcgtctctgttcctcactcaactgcagggagggagatacttctgtcctagccttctcagggcctctagcaccccacatcagagagcatggctcataattggcactgaaggaccaggcgcagtagctcacacctgtagtcccagcagtttgggaggccgaggcaggtggatcacctgaggtcaggagtttgagagcagcctgaccaacatggtgaaaccccatctctactaaaaatacaaaaattagcttaaaaatacaaaaattagctgggtgtggtggcaggcaagtgtaatcccatctacttggggggctgaagcaggagaatcacttgaacctgggaggtgaaagttgtagtgagccgagatcgtgctgctgcactctagcctgggtgacaagagtgagactcccatctaaaaaaaaaaaatctctatcagtatggatttgtacagattaatgttatactttggtttctaatccaattatgtgtacacacacacacattatatatatatcctcaacaacagcaaacattatagaaatatttgcaatgtacttgcaaaagaattttactgggcaacaaatatgtaaagagttcctacaaatcaataagaaaagatcaactgaaaaaatatgcaaaggatatgaacacatcaccacagaaaatacctaaaagtaataaaaatggactttaaatctgtgagaaaatggctgggcacagtgcctcacacctgtaatcccaggactttgggtggccgagttgggaggattccttgagctcaggagtttgagaccagcctgggaaacatggtgaaaccctgtctccacaaaaaatacagagattagccaggtatagtggctcatgactgtagtcccagctgctcaggaggctgacgcaggagaatcacttaaacccgggaggcggaggttacagtaagtcgagatcacgctattacactccagtgttgggcaacagagagagaccctgtctcaaaaataaataataaaaaatagataaataaattaattaaaatatatgagaaaatgttcaccctgattcataggaaggtagattcaagttaaaactacaataaggctaggtgtagtggctcacaccgataatcccaacactttggaagactgacacaggaagactgcttgaggcgaggagctcaagaccagccggggcaacatagggagatcgtggctctataaatatggggtgcggttgctcatgcctgtaatctcagcattttgggaggccgaggtgggtggatcacctgaggtcaggagttcgagaccagcctggtcaacatggtgaaaccctgtctctactaaagatacaaaaattagctgggcatagtggtgggcacctgtaatcccaactactcgggaggctgaggcaggagaatcacttgaacctgggaggcagaagttgcagtgagccacgattatgccattgaactccagcctgggcaacaagagtgacactctgtctcaaaataaaataaataaataaatatatatatgtatatgtatatgtgtgtgtgtgtgtgtgtgtgtgtgtgtgtgtgtgtgtatattaagactgagtgctgtggctcacacctgtaatcccagcactttgggaggccaaggtgggcggatcacctgaggccaggaatttgagaccggcctggccaacatggcgaaatcccatctccactaaaaacacaaaaattatctgggtgtggtggcaggcgactgtaatcccagctactcgggaggctgaggcaggagaatcgctagaacctgggaggtggaggttgcagtgagccgggatggcaccactgcactccacccagcctgggcagagccaggctccatcaaaaaaaaagaaaaaagaatattcagtgccacctagtttgtggcgggaaaagactggaaataaacagaataagcattgagaggcacttttctttttttttgtaagcgatgcatccgtgcaataaatcgctgcagcattattagccattctgatgggcagccctctgaaatttaagtgatgaacggccgcgatgcttgtggttgtcactagagggaagcacatgaccatgaaagcttcttctatgaccgtctcaaattattgaagggtttatcctgtgattttcattcttcggttcctttcttttcccttttatttaccccatgcatttctatccgttttcttctttttctttttctctttctttcttttccttccttctttcttttttctttctctctctctctttctttctttctttttaaatttttttattttttgagacggagtctcactctgtctcccaggctggagtgcaatggtgcaatcttggctcattgcaacccccacctcctgggttcaaacgattctcctgcctcagcctctggagtaggtgggattacaggtgcctgccaccacgcccggctaattttttttgtttgtttttgtttttttttttagacggagtctccctctgtcgcccaggctggagtgcagtggcacgatctcggctcactgcaagctccgcctcctgggttcacgccattctcctgcctcagcctcccgagtagctgggaccacaggcgcccgccaccacgcccagctaattttttgtatatttagtagagacggggtttcaccgtgttagccaggatggtctcgatctcctgacctcgtgatccgcatgcctcggcctcccaaagtgctgggattacaggtgtgagccaccgcgcccggcctagatacaggattttgccatgttgtccaggctggtctcaaactcctgacctcaagtgatcccccagcctcagcctcccaaagtgctggcattacaggtatgagctaccgtgcccatattaactgttttttgttttttgttttttgtttttaagatggagtctggctctgtcacccaggctggagtatggtggtgcaatctcggctcactgaaacttccgtctcccaggttcaagcaattcttgtgcctcagcctcccaagtagctgggactacatgcgcacaccaccatgcctggctaatttttatattttttagtacagatggggtttcaccatgtttcccaggctgttctcgaactcctgacctcaagtgatccacccgccttggcttcccaaagtgctgggattacaggtgtgagccaccacacccggccctgtattaacttttgatagatattcaacctacaaataggaaagtatatctagtataaaggtacagctcaaaaattgtcccaaaccaaacacatttatgatttgtgtaatcaggtccctgaactcatcaagaaaaataatatttctgcttcccccaccacccacaaagtcaccctgatcctcccccttggtctctaactttcccatggttaagcactggcccgatttctgtcttcataaattagtacagggcacagtggctgacatctgtaaccccagcactttcggaggctgaagcagaaggatcacttgaggccaggagttaaagatccgcctgggcaacacagtgagacccaaaacgtgaacatatgtttatctcaaacataaataacaaagtaaattaatcaatcagtactgcccactgtgaactacattacactaaatcccataatgacaggctttttgtcctcaacgtaaagcttgtaagattcatctgtgttgttaaatgtttttgtaggttgaatatcagcaaattttttcttgtaaaaggccgtatcgtaaatattttaggctttgtggaccaggcagtccccattgcagctactcacctctgtccctgtagtcaataggcagccacagacaatatgtaagtgagtgggtgtgggtgtgtataccaataaaactttatttataaaaataagtgatgggctgtgtgttagtcagggttctcaaacagaaccaatggggagtgtttgtgtgtgtgagagacagagagacagagagagagtgattttaaggaattgtggagtgcagtggctcacgcctataatcccagcactttgggaggctggggcaggaggatctcttgagcccaagagtttgagaccaccctgggcagcatggtatcctcatctctaaaaacaaacaaacaaacaaattaataaataaataaaatacatttgccaggtgtggtggtacacacctgtagtcccagctagttgggaagctgaggcagagttgaacccaggaactcaaggctgcagtgagctgtgatcacaccactgcactcaagcctgggtgacagcacaagatcccgtctaaaaaaaaaaaaagaaagaaaagaaaagaaaaagaaaaaaaattgatttgcttgatatgggggctagccagtctaaaatttatagaacagggcagcaggctagacattcaggtaagagtcaatgttgcaggccgggcgcggtggcccacgcctgtaatcccagcactttgggaggccaaggcgggcagatcacgaggtcaggagttcaagaccagcctggtcaacatggcgaaaccctgtctctactaaaaatacaaaaattaaccgggcagccaaggcacaagaattgtttgaaacccaggaggcagaggttgcagtgagccgagattgcaccactgaactccaccttgggcaacagaatgagtccccgtctccaaaaaaaaaagaaaaccaaaaacaaaaacaaaaaaaaaaacagaaatagagtcagtgttgcagtgttgggtccaaaaactgtagggcagtccccacagtctggaaacgaggactttttttttttctttttttttttttatggagtctcgctgtgttacccagcctggagtgcagtggcgcgatctctgctcactgcaagctccacctcccgggttcaagcgattctccagcttagcctcccgagtagctgggactacaggcacacgccgccacgcccggctaatttttttgtatttcaggaaagacggggtttcactgtgttgcccaggctggtctcgaactcctgagctcaggcaatcatctgcctcggcttcccaaagtgctgggattacaggcatgagccaccgtgcctgaagaaatgaggatttttatgtcccagtcttgaggcagaattccttcttctctgggaaaacccgaattttgctcttacatccttcaactgattggacgaggcccactcacattacagagggtcgtttccttcacttaaaggcagctgactctagacattcagcacatctgcagaataccttcagagcaaaacatgcagatgcctgttggagcaaacaaccgggcagcatggtctcgccccatggccccatgcaatcaaacatcacagtctggatttgatccggggccatggtttgacagctccagtgttgttcacgtgttcctgggcttaggatgggaccatgtcctgataaactcttcataagttaaaaatatcataagtcggccgggtgcggtggctcatgcctgtaatctcagcactctgggaggcttagacgggtggatcacctgagctcaggagttcgagaccatcccaatcaacatggtgaaaccctgcctctactaaaatacaaaaaattagccgggcgtggtggtgtgtgcctatagtcccagctactcaggaggctgaagtgggagaatcacttgaacctgggaggcagaggttacagtgagccgagattgtgccactgcactccagcccaggtgacagagcgagactccatctcaaaaaaataaaatcataactcaaaaatgcatttaagctgggtgcagtggctcatacctatattcccagcattttgggaagctgaggtgggaggatcacttgaggccaggagttcaagagcaacctgaataacatcataaaaccccatcttggccgggcacagtggctcatgtctgtaattgcagcactttgggaggccaaggcaggtgaatcacctgaggtcaggagtttgagaccagcctggccaacatgatgaaaccccgactctactaaaaatacaaaaattagccaggtgtggtggtgcacacctgttatcctggctactcaggaggctgaagcaggagaatcacttgaaccccagaggcagaagctgcagtgagccaggatcaccctgctgcactccagcctgggcaactgagtgagactctatctttaaaaaaaagaaaaagaaaaaaacgtatgttggaatcatctgtcttcgtttcctgggccttccttaacaaagtagcacagcttgagtggctcaaacaacagaaatgtatttcctgacggttctgggggctggaagttcaaattcaaggtgttggcagggttgattcctcctgagggctggcagggagagtctgtcccacccttctctgtccttgacctgtaagatgacgccttcatgtacacgtgacggtgtccctaagtgcatgtctgtgtccaaattttccccctttttataaggacaccaatcagtttggattaggatctggactaatggcctcattttttttcttttttttttagacggggtctcgctctgtcacccaggctggagtgcagtggcgtgatctcggctcactacaagctctgcctcccgggttcacaccattctcctgcctcagcctcccgagtagctgggactacaggcgcccgcctccatgcccggctaattttttgtatttttagtagagacggggtttcaccgtgttagccaggatggtctcgatctcctgacctcgtgatccacccgcctcggccgcccaaagtgctgggattacaggcgtgagccatcgtgcctggcctctaatggcctcattttattttgattacctctgtaaagaccctgcatcctaataaagtcaccttctgaggtcctggggttagaacttcaacatatgaatttggggggcagcacaattcaatgcataatcaccctgttgtccatgtaggttttcttttttttcattcctgtttccacccattctagtgtggatgttcatttcaattagttccagttctgggctcttacaaataaaaccgatatgaacatttccatgcatgtctttcagtatatacatgtgcccttccttccttccttccctccttccttctttccttcccgtccttccttctttccttctttccttccttgcttcctaccttctttccttccttccttccctccttctttccttccttgcttccttcctcctttccttccttccttctttccttccttccttccctccttccttccttccttttttccttccttgcttccttcctcctttccttccttccttctttccttccttccttccctccttccttcccttccttccctccttccttcctttccttccttccctccctccttccttccctccttccttcctttccttccttccttccctccttccttccttccctccttccttccttccctccgtccctccttccttccttccctccttccttccttccctccctccttccttccctccttccttccctccttccttccctccttccttccttccctccatccttccttccctacttccttcctttccttccttccttccctccttccttccttccctccgtccctccttccttccttccctccttccttccttccctccttccttcccttccttccctccttccttccttccctccgtccctccttccttccttccctccttccttccttccctccttccttcccttccttcccttccttccttcctttcttctttccttcctttccttccttccttctttcgttccttccttcttttcttccttcctttccttccttccttccttccttccatctgtcctttcttcctcccttcctcccttcttccctccctccctccctccttccttccttctttccttccttttttctttttaatcagatggagtcttggtctgtctccaccctggagtgcaatggcacaatctcagctcgctgcaacctccgcctcccggatttaagccattctcctgcctcaacctcccaagtagctgggactacaggcacatgcccagctaatttttgtatttttaatagagatggtgtttcaccttgttggccaggctggtctggaacgctggacctcaagtgatcctcccaccttggcctgccaaagtgctgggattacaggtgtgaaccatcatgccagctggcttgctttcttttctttctctttctctttctttcttttttctttttctttctttctctttttttctctccttctctccctttcttccctccctctctccttccttccttcctcccttccttccttctctctctctgtctctttcttctttttgaaatagggtcttgctctgttgtccagactggggtacagtggcatgaccatggttcattgtagcctcaaaccctggggttcaagtgatcctccctcctcagcctcccctcagccttccaagtagctgagaccacaggcatgtgccaccatgcccagctaattttttttcttttttttgtagagtcggggtctcactcgttatgttgcccgggctgctctgggacccctgggctcaaggagtacccctcattgggctcagcctccgaaagtgctaggattataggcgtgagccactgtacccagccaaatgtccccttttcattaggacactggtttttggaccagggtcccaccctactcggggatgatgtcatcttaactaactccttctgcaaagacattacttccaaataaggtcaccttctgaggtcctgggtgttaggacttcaccatatgaatttagggaggcgcagtccaactcataaccaccctgttgtcaatgtagggggttctttttctttttctttctttttttttttgtttttgagatggattctcgctctgtcgcccaggctggagggcagtggcgtgatctcagctcactgcaacctctgcccacccggttcaagcaattctcctgcctcagcctcctgagtagctgggattacaggcgcccaccaccacgcccggctaatttttgtatttttagtagagatggggtttcatcatgttggccaggctggtctcaaactcctgaccttgtgatccgcccacctcggcctcccaaagtgctggtattacgggcgtgaacccagccggggggttatttttcattgcatccattctcgtgtggatcttcattaggttggttccaatctggggcttttatgagtaaagtgactatgaacattcccatgcatatcttttgctatatagatgtacccttccttcttttttttttttttttttttttttttttgagacagggtccgatctgtcacccaggctggagtgcagtggctcaatcacagctcactgcagcctcaaccccccaggctcaagcaatcctcccaccccagcctccagcctcctgagtagctgggactacagacacttgccatgcgtggccaattttttctcttctcttctttctcttctcttctcttctttctcctctcttctattctttctcttttcttttctttttttagacatggggtctccctatgttgccccggctggtctcgaactcctgggctcaagtgatcctccagctttggcctcccaaagtgctggggttacaggcgtgagctactgcacccagctcaagcattgttaatagggatacatataacataggtgaagttcctgcacacagtgggaccacagagatgctgtcatcatttgtgattggctcagggaatcaggcaatgaattgcccattggagaagacaaggaatagaacagagggaagagagagattaaaggttaaaagcactgggcgctgtggcttacatctgtaatcccagcactttgggatgccaaggcgggcagatcacctgaggtcaggagttgaagaccagcctggctaatatggtgaaaccctgtctatactaaaaatacaacaattagccaggcgtggtggtgcgtacctgtagtcccagctactcaggagtctgaggcaggacaatcgcttgaacccaggaggtggaggctgcagtgagccaagattgtaccactgcactccagcctgggtgacagaatgagactctatctaaaaaaaaaaaaaaaaaaaaaaaaaaaaaaaggctggagggagttgtgtgttgcctggcaggtccacgggggacagagatccctcctacccacctgtttccccccagttctgtgccagtggggtcagcggggagatcaggagaaggagctgctggtgggttcagttgctttcgaggtgctggggacaggtggctgcagggagagtgagtgaactgtggggtggaccaatacaagggccaccctgtggggtagtttggggggctatctgggttcagggaacctccacagccccgtccctgcctcccagagcagcaggtacctgcctggggacagcaggcagccaggctgggagctggggggttggggaatctagctactctctcatccagtcccagctactgctgctggccaaggctgtgacctttctcccagatcctggagctgagtaacagttactggaaaaataagttggccatctgggggtggccacagccccatcctcttgggtccccagcctggctgctagaagtgagggtaccagggctgggctgtctgtcccatacaacagtaccatagccaccggtgtgaccagaccaggtacctcctccccgtcacactctatccccaccatgccacacttcccccactgcaggggcctgaaatgacagccccactcccatacccggacaccaaggaaggcgtgatgggtgggtggagaaagagtcccgggcatccctggcagccctgaatgtttcctctggccccagtctcagagacgcccatgcctgggaagagcaagtcagcaacttggcccagaaggagactttgacagcgaggagggctgcatttgaatttcagctctgtcactttttttgcaggtgactgagcaggtcactccttttctctgggcctcagtttccccctctggaaaaatgggaataatgaagcaccctcctggccggtttcgcaatgctcaaatgcaatatggttgtgctgagtgcaaagcgtggtcctgagagggcactcaatacacatgaacgattcagccctaagttctcgaaatatgttcaaggtacccgctgcgggtctagctctgtcctagacacaggagatccagcagcaaacaaaagtgacactgacacctgtccttctcgagggtttgggactccagggagagacacaaaccgtgaattaaaatgttaacgttcaagaaggatgaatgctataaagagaaatgaaactatcgttagatcttattattgttgtgactgttactgttgatacccaattgatcgtgattatagccctgattccagcttccacagttattggaggtatgcaattatttagcaccaactgtgtaccaggctccaaatacctatagccccacaaaatcatttcccagaagagaaaccaaggtctcaggtctgtccaagattgtgagctggttgtgcagggcaggcctgggagtggatctgccagatggcacgattcccggacctgcccccacctcccagggggagctggcatcctcccagctggacctggcccccccttggagcttccccaacctggggatacagaagggcccccacggggagggaggcagccagggcaggcagtggcacagagcaaggagggagcagggcgtctgccacccgcccccacggctgcctgggaaacgccacggcctaatcctggctcaagaggacacgttgtaccagagattatataaaccgacctctccctttgtttgtttaattctttcaggctttttccctcatccttctctctttaatcgctctgccaacagggctgggggtggggtgctccgggctaggcctcttccaggagggagggggctgcatacccagcaccccccactctggtcatacccctacctggtttcccagccacccaggcccgctcctcccccagtcacacacaccaagtcctgccggtggcaggggtgtggggctggacaggcttggccagtggagtgagtctgagaggccaaggccaagggcactgagtcaggctcggactctgctgggcccctaggatgtggcctctccacttggcactcagcttcctcttccaaaaaaatgggatccctgtggtcccaacccccaggttgttgagaacacgcccatgcaaggagtgagcatggcccatggtggatgccgggtgagagccgctgcctgctcccagcccacactacagacacccagggaacagtttcgccctcagactggccctggagcaccgtgactgtggtggccaattgggcctccgagatgtccacgatgcctggtgggtgctctgatgtggaacactgggcaccatcacccagagagggcaaccaggggtgtctggctttgtgctcacccaccgctgaccccgagcctggccctggccctcaccaagacccagtatttccatctgtgtcctggggaggccaacacgaacctccccaccatcagggcagtccacccacagaggggcctgggttcccatcctgaccccctcctttaccacctctgccaccctgtgctgcttggttgctctgtgcctcagtttctccatctgtaaagtggggatcatcatagcagtcagaccccccaagaggattaatcgtgttaatccttataatgcatttattcttaatttatattactttttttttgtagagatgggcttttcccatattgcccaagctggtctggaactcctgggctcacgtgatccacctgcctcggcctcccaaagtgctgtgattacaggcatgagccaccacatctagctatgcattttagaacgggccctcacgtatattaacatgaaagtatctgctaactaaaagaaaataacagcaacagaaataagtaaagaaatggccagttgcagtggctcacgcctgtaatcccagcactttgggaggccgaggcaggtggatcacctaaggtcaggagttcgagaccagcctgaccactatggtgaaaccccgtctctactaaaaatacaaaaattagctgggtgtggtggcgtgcacctgtagtcccagctactcgggaggctgagacaggagaattgcttgaacccgggaggcagaggttgcagtgagctgacatcgcaccactgcactccagcctgggcgacaaagtgagactcagtctcaaaaaaaaaaaaaaaattaaaattaaaaaaaaaagtaaagaaagaatccaggcccattgcacacatgggaaactgaagttgatgttcccaaagcaagtcagaggcagggctgggagctgagaaatcagctgggaacctctcaccctacacctccctggagcccagtggagggaggctgggggcaggggacagagaactgaggtcatggtgccaggtcccaaggggcccaggctcacgttcctgcctgatggctgcaagctcccaaacatcccactctgagcctctccttcccttctctgtacgacaagccccagggtggcacagggtgggcggggtgttggggtgcccggccactcccagccctttacataacctgcggcacagcaggaaatcaaagtgccaacaactgcctcctcagtaaccgacttcctgtcgttacccacccaccttgggcaccagctgcctgctccctacctccagtggcagaggggtcccatccctgaccccagggtttcctccccaaggaagggcccccgtaccctaggctgctccatcatgcgaccctgagccagtgtccagccagctctggcctcagttcctccatccagatgtgtccctgggctgccaggaccgtcaccctgctcctttcggccactggctgggagactgcatactggctgccccagacctgaggctggaggtcagagggcaaagggcaaaggccaaggaattccctttttttttttttttctgtgacagagtctcgctctgttgtccaggctggagtgcagtggcactatcttggctcactgcaacctcagctcccaggttcaagcaattctcctgcctcagcctccctagtagctgggattacaggcatgtgccaccatccctggctaatttttttttttttttttttgtatttttagtagagacggggtttcaccatgttggccaggctggtcttgaactcccgacctcaactgatttacctaccttggcctcccaaagtcttaggattacaggtgtgagccaccacacctggctggaattcctttttttaatttatttattttattaatttatttatttatttattttgagacagagtatcactctgttgcccaggctggagtgcagtggcgtgatctcggctcattgcaacctctgtcccccaggttcaagcgattctcctgccccagcctcccgagtaactgagattgcaagtgcacgccaccatgcccggctaacttttgtatttttagtagagacggggtttcaccatgttggccaggctggtctcgaactcctggcctcaggtgatccacccaccttggcctcccaaagtgctgggattacaggcatgagccaccgcaccggcccagaatttcctttttagagcgagagaagcaggagttgcctctcccattgagggagggagactctggttcttcagggcttttcaaagctgtgggtaggcggtagagggcgccccccacccagtggtgcaaagaggagaccccagccctgctctggaagggagtgagggattggggggaaggtctctggggcaaacagcacttagtgacagccacagtcatatgactgtccgcattttacagatagggaaactgaggcatgaagcaaggccgccatctgcccaaggtcccgtggtctgtaagtggtagagccaagatttgaacctctgaagacaggggtgttggtggaggtgtcagggaatgggacctccgtgggctctgtggggctggaaatcacaatatctctgcatagacatgggtgacgttcccttccgtgccgtgacccctgccaggcatgttagcgggttcctcttagacagatggagaaactgaggcccagaaaacagaagcagcttgggcaagttcattcatgggatatggtgagagaggctcggccagggaaataccctcagctgggaggactccaggacctgcaggcagcatcgccacccttcatatcgcccaccttgtgaggtcctagtaccccaggcctcagtttctccatctgtgaagggatagatgccagcagtctgtgactgcgacctcggaggctggctccctggggctccgcctggctgggcatgagggcctggagtgtgtgggcaggctctggagagccaggtgatgcctgtgcctacacccacggtgccagccctatgggacagaggggctggggttgactcttctgccacgctctgtgctctcctttccctactgcgcagggccaagcttggttccacgtcttcatccaaagctgcacagcacgtgagcgggaaaagcagggccagctcagccagctccaaagcccagctctttccacggtgtccggaaggtttcagagaactcaggacactagctccctggcctggagccccagggcccatgggcaaaagactgcattttcctgagcctcagtttccccgtctaccccacaagggccatcatccacctgctcattgctctgtgtcttttttttttttgagagggagtctcactctgtcgcccaggctggagtgaaatggcgtgatcttggctcactgcaagctccgcctcccgggttcatgccattctcctgcctcagcctcccaggtagctgggattataggcgcccgccaccacgcccggataatttttgtatttttagtacagacagggttttgccatgttggccaggctggtctcaaactcttcacctcaggtgatctgcccgcctcggcctcccaaagtgcttcacttttttttttttttttaagatggagtctcgctctgtcgcccaagctggagtgcggtggcgcgatctcggctcactgcaagctccacctcctgggttcaagcaattctctgcctcagcctcccgagtagctgggactacaggcgcccgccaccacgcccagctaattttttgtatttttagtagagacggggtttcaccgtcttagccaggatggtctcgatctcctgacctcgtgatccacccacctcggcctcccaaagtgctgggattataggcgtgagccaccgcgcccggccccaaagtgcttcactttgaagaacaagtaatgtgtccagtgagggagaaacactgggtagatgtcctgctccatggatcgccaaacacaggaagtgctaccagctgtctatccctcatccctgttgctgctgggcttctcctccccaaccgtgtggaagattgggagggagggttctagggctgagcccaaacagaccctgaaccacatcctgagcaagcctcacctcttgggagggctgcaggaggggttggggccttgactcagcagaaacacaagcagcggcctccacgcttgggatctgagtcccaccatgttgccctgcacggcctgggtgcgaccgtgaggggacctaggagcctaagtgttgcatgtggccatggatccctgggacagaccccttcctctctcagcctcagttttcccatctgtaaaatgggacaggccaggcgcggtggctcacgtctgtcatctcagcacttttggaggccgaggcgggtggatcacctgaggtcaggagttcgagaccagcctggccaaagtggcgaaatcccgtctctactaaaaatacaaaaatgagccaggcgtggtggtgcatgcctgtaatcccagctactcgggaggctgaggcaggagaatcggttgaacctgggaggcagagattgcagtgagccgagattgcaccactgtactccagcctgggcgacagagcgagactccatctcaaaaaaaaaaaagaataacactggctttgggagctgtgtgcgaagaggtgacaatgacaatcaatcccaggcgagccatggggggctgaaccaaggaggctccccctgcatccaacccagacgcattgatcacgcgcctaccatgccctcttgtcgaacccagggcagcctggagaggtgggtacaggggtcaccaggcagaggacagagagcccaggggcaggacagagacactgaagcagagggagcctgagttggcctcggactcaatgtgtgaccgtgagctggtgcctcagtttacatatctgtaaaatggggtgagaagtggctatgtcaggagtcataagatgggactcatctgtaaaagtacctggcacatggtacatgcacaataaacctgtcattgtcctcatctgccaacactgtaacgaggatatttatttatttattatttatttatttattttcgagacaagagtctcactctgttgcccaggctggagtgcagtggcgcaatcttggctcactgcaatctctgcctcccgggttcaagccattttcctgcctcagcctcccaagtagctggtactacaggcgcatgccaccgcgcccagctaatttttgtatttttagtagagacggggtttcaccatgttggccaggctggtttcgaactcctgacatcaggtgatccacctgcctcagcttcccaaagtgctaggattactggcatggccaccacacccggccatgaggataaatgaagcccgccctatactcaggagactgaggtgggaggatcacttgagcccatgaattccaggctgcagtgagctatgattgcacccgtatgatccagcccaggcgacagagcaagaccctgtctctacaaaaattaaaaaattagccaggcatggtggtgcattcctgcactcctagctacttgggaggctgagtcgggaggatctcttgaacccaggagttcaaggctgcagtgagccgtgactgcaccagtgcactccagcctgggcaacagagtgaaaccctgtctctaaaaaaggccaggcgcggtggctcacgcctgtaatcccagcagtttgggaggcagaggcgaggggatcacctgaggtcaggagttcaagacagcctggccaacatggcgaaacctcatctctactaaaaagacaaaaattagccaggtgtgctggcggccgcctgtaatcccagctactcgggaggctgaggtaggaggattgtttgaacccaggaggcagaggttgcagcgagccgagatcacgccactgcactccagcctgggcgacagagtgaggctctgtctcaaataaataaatattaaaattaaaacatgttaaaaatgtaataaaaagccagccctctgaaggactggcccatcgtagcaagtcaataaatgtttgttgagtaaataacaaaaataatgacgcagctccttccttgggcatgatgtcttcccgtttccaaaactgctagatttctgcagctggcttctcagcactgtggacatccgggccagatcggcatgtgtgtgttggggaatgtgctgtgcatggcgggaggtttcgcaacatccctgcctccacctactgcatgctagcagcaactccccccacccacccacccacccctgtcccagtcataacaaccaaaaatgtccccagacattgccaagtgtcccctggggggcagaattaccccgttgagaaccactgcccggcatcgcggttactgttcaaagttcccttttagcagaagagaataaaggctcagagaggggcaggtctagcgcagggtcacacagcacagtggggtggagccaccttctgtgctgggcatgactccgggcacagccgagccgaggtgggggccaacaacccctaccatgccagggttccaggaactgccagcaggggcccaggccatgccactgttgcaaaatctgagggcggcataccggcaagcctgagcagttgccacggcctcagccccacgggcaccgccaggaaagaaaaatgcaacttactcctgggcaccgggacaaccggtggaacctcaggcgtgggacggctgccggaaagcagggcccaatcagagacagctgccttgctgtgtggcctatcagaagatggctgcatatgtcctggccaatgagaatgccccagtgaggaaggccacgcccccccaagtgaagcccattggccccatgaaagggcttgaggtgggtccctttggtcctaaaatttcttcttcactctgttggttgcagacgcaggtcagctgaggcttcctgatgtgtgggcactgagggtcgatctgggagagcaaccttctcagaggtgtaacccccagactgttaccacttaaccagagccaggattctccttaacatttcaatgtcacttattaaacctttatacatttatttattaaatagagacaggggtctcgctatgttgcccaggctggcctcgaactcctggcctcaggtggaattcccaccttggcctcaaattcccaaagtgctggaattatgggtgcgagccaccacgaccggcctcattaaacatttattgagcacctgctatgtgctggtcactgaggatgtgaagatgaacaaggtggctgtagagaaacagccacattggaggaagggcattccaagcagagggaacagcccatgcaaacagcctggggcaggacggcacctgatgtggaggaacagcgaggaggcccgtgtggctgcagcggagggaggagagggagagagggaggaggcgagggcagggagggacagggtgggtcaggcagggctttgtagccctcggggaggactctgtcgcctggagggcagtgaggagccatggagggctttaggcagtggagagatgtgatgtgggactagagccaggtcctttccctctctgagcctcagtctcctcatccgtcaaatgggggaatgagaatgcctacctgggggccggatgcaggggggagggaaggaccctgcacagtggccggcacatggcaggtacacagctcccaccaaggtccagccctgtcatagcccgcctggacctgtgccgtcccctccgcctggatgctcccactcccaccctcgcccctccacggcctgtcctccctgaagcagccagagggtgcctgtgagcacccaagtcagggcccatccctcctctgcccgcagccttccatggctcccacctccctcaggatcaaagcccaagtcctccttgcagcctacgaggccctgcacaacctgttctgtcccctccctgccctcccctccccgcttactccttgtcgctcactctgctccagccacacaggcctccttgctgttcctccaacacgccaggtgccatcctgccccagggcctttgcacagacctgaaacgctcttcccccccccccgcccccccctcccgccgcccggctccccatggctcctcccttgcctccttcaattctcagcttcttaaaattgcacccttggccaggcgtagtagctcacgcctgtaatctcaacagtttgggaggccaagggggacggatcacctgaggtcaggagttcgaggccagcctggccaacatggcgaaaccccatgtctactaaaaatacaaaaaattagctgggcatggtggtgggcgcctaaaatccagctactgggaagctgaggcagaattgcttgaacccaggaggcggaggttgcagtgaactgacattgtaccattgcactccagcctgggtgacagtacgagactctgtctcaaaaaaaagaacagggcctggcacacagcaggtgctcaataaatgcgggtgcatgaattgctgaaaggcggctgccattatccttacccctccatgttccagatcagtccctgtccccctttttgccctccttctcccactccagccaccctccccagccctgggggaaccccagacgtcctttgggtgggagagggaggagcaggtaggaccagccacctccagcagccttcagcccctcgtcacaccgacggccaagcaggagtcctggtgcttttcttcttgaatcagaggagggggtataagcccggcagtggccacgcttgtgtagggggaacttcatgccacacggttgcctgagctcagttctggccaggggctgtcctgtgggatggcttccctggaggtggtggggatggttctacgtgggtgggtgcagaaatgccgtggggtcccgaccccacactcaacctgtaagcccagctcagaccatcttggtgggggtggtaggcaaggccctggcgagccccctctttccctatttctggcccagggtccccgcctttagctctggactccaccagcaaaaccccaacgccacgaggttttcaacgatgaacagatggtcacaggcggtgggggtgggggctgagctgagtctgaggggacccagggtctctggagcagtcctgctgccctcccagtggggaaactgagacagggagccccctccgtgcccctgtgcctggggctgggaaaccggtgccatcctcggaagatccccagagcggccacgtcatagttggcgagggcagctccggggagggcgaggaccgggcccactgccatgtcaaattcctcccgggagcggtgggggaaggagaggcagtgcttttttttgtctcccctgcatcctcacccccaccaactccgcgacagaatcaaaaagaggagagagagagctgttggcaggaagaaggaattggagccaagccgaggctgggctcaccctgaaaaatcacactctgggcgggaagagaggacagaggctcttccaccccctttccagcattttgcaaaggcggaaagggggtggcccactcaaagggcatcagacgtggccttcacggcccgcagctggcagctgccacctctcccacgagtggcttgacaggctttctacctccagacctcagcttgggccgtcctctcctcctggaatgccttcctcatccacctcagtctcctcccaggcaccacctgggatctggacttcaagtcccatggacctacaaggccaagaagggtcgcgttgcatcctaaggccaaaataaaccccaaaagcagtaatatgtaatcgatctttatttaaatattggtacttcattcattctggatcttctgcaatcacttttattcttagaaagtttgtgttaaaacatgagttatcagttgggtacggtggccccacccacccagcacccagtgtcaacccagcactttgggaggccaaggcaggaggatcacttgaggccaggagttcaagactagcctgggaaacatagcaagaccccatctctacaaaaatttaaaaattaggcagggcgcagtgactcatgactgtaatcccaccattttgggaggccgaggcaggcggatcacttgagttcaggagttcgagaccagcctggccaacatggcgaaaccccgtctctactaaaaatacaaaaattaaccgggtgtggtggcgggcgcctgtaatcccagctactcagggggcaggagaatagcttgaacccagaggcggaggttgcagtgagccaagatcgcaccactgcattccagcctgggagacagagctagactccatctcaaaaaaacaacaaaacaaaaaaagagagagagaaaataaaataaaataactccagggaggggcaagggctatgcgtatctgaactctgtcccagcccatggagctgcgcagggacggaggggccccaggcacagtggggccggctgcactaacctggtcatcagtctttgctccgggagcttcagcactgagttttcagggaaggcatggctgcctgggttccttcctagtgccggagcccgctctcaggggcatgaccccagcagatccagccacgccagcggtcccattgtgtgaccttggataacccctttccttcatctgacgcctcctctatcaaacgaggtaataagggctcccctgcctggcctggggctgtctgtgcatgaaatgggataattgccggaacccggcctggctaccggagctgttattaaggctgcagagctacctgtgggcctcaatttcctcatctataaaatgggcttaatcatacctgctgctgttaacctctcagggctctggaggatcaaggggcactgaggatgccttgcagaggaaacgtctgaaggccgagcaaattctgcaaaagtggcctcagtggcttttcttgtgaggttgcctgccccccaccctcaatttgtataacgtcccctgcagaagtgtggagaaagaggaaaaaatataacaaacaaacaggcaagaaacagccaacacagccacatccattgttgcttttttttttttttttttgagacagagtcttgctgtgttgcccaggctggagtgtagtggtgagatctcggctcactgcaagctccaactcccgggttcaagcgattcttttgcctcagcctcccgagtagctgggattacaagtgcgtgccaccacgcccggctaattttcgtgtgtttttttttagtagagagagggtttcaccatgttggccaggctggtctcgaattcctgacctcaggtggtccaactgcctcggcttcccaaagtgctgggattacaggcgtgagccaccatgcccagcccattgttgcaattttaacctcttttctcctgtccccgaagcttacccctcagtttctttttttgtttctttttttttttttttttttgagatggacttttgctctgtcgcccaggctggagtgcaatggcatgatctcggctcactgcaacctccacctcctgggtttaagcgattctcctgcctcagcctcccgagtagctgggattacaggtgcacgccaccacacccagctaatttttgtatttttagtagagacggggtttcaccatattggccaggatggtctcgatctcttcaccttgtgatctgcccaccttggcctcccaaactgctgggattacagacatgagccactgtgcctggccatccctcactttcttttcctgctcttttttgctgctaagatatagaaggtagagccattggggcttaaggagatgggctttatgagtcaacttgcccaaattcaaatcccagacttaacactggctgtgtggcattgaggaagtgcctcaagttctctgtgcctcagcttcctcatctgtagactgggaatgatactgttaggttggtgccaaagtaattgcagtttttggtcaggcacggtggctcacgcctgtaatcccagcactttgagaggccgaggtggtgaatcacaaggtcaggagttcaagaccagccagaccaacatggtgaaatcccgtctctactaaaaatacaaaaatgagcccagcgtggtggcacgtgcctataatcccagctacttgggaggctgaggcaggagaatcgcttgagccctggaggcggaggttgtagggagccaagctcatgccactgcactccaggctgggcaacagagtgagactccatctcaaaaaaataaataaataattattatttggtagagatggggttttcccatgttggccaggctggtctcaaactcctggcctcaagtcatctgaacgccttggcctagttttggtatttttattagagacgaggtttcaccatgttggccaggctggtcgcgaactcctgacctcaagtgatctgcccgccttggcctcttaaaatttttacttttttttagtgatgaggtctgcctctgttgcccaggctggagtgcagtggtgtcatcagctcactggaggctcagcctccctgggctcaagtgatcctccctcctcagccttctgagtagctgggactaggggtgcgctccacacacacagctaattttgaaattttttgtaaagatgggatctctctaggttgcccaggctgatctcaaactcctgggctctagcgatcctcctgcttcagcctcccaaagtgctaaaattacaactatgagccaccctgctcggttttgtttttttacattgtttagtggtagaaagaagtcaaaagaatactttgtgacacgtgaaaagtacatgtgattcacatttcagtgtgtgtaaagtttgattggcacacagccacgtttattcatgaccatgccgtctatggcagcttttgtgcactagggcacagccaagcaggtgcaatggggatgatatgtcctgcaaagatgaaaatatttactctctggctctttacagaaaaagtttgcccacccctgagttaatgtatcatgagcactttgaacaatgctgggcacaaaatgtgcttgggattgttattcaaaatgtgtttcaggtcgggcgtggtggttcacgcctgtaatcccagcactttgggagactgaagagggcagatcacctgaggtcaggagttcaagaccagcctggctgacacggtgaaacccattttaatctctactaaaaatacaaaaattagccaggtgtggtggtgcgtgcctgtaatcccagctactcaggaggctgaggcaggagaatcacttgaacccatgaggcagaggttgcagtgagccgagatcgtgccgctgcactccagcctgggcgacagagcgaaactccatctcaaaaaaaaaaaaaaaatgtgtttcaggctgggcgaggtggctcatgactgtaaacccaacactttgggaagccaagatgagaggatcgtttgagccctggagttcaagaccaccttgggccacagagcagataccacctccacaaaaaaattttaaaaaattagccagttgtggtggtgcactcctgtgtagccccagctgctcaggaggctgaggtaggagatcccttgagcccaggaggacaaggctgcagtgaactattattgcaccactgcactccagcctgggtgacagagcaagaccctgtgtcaaaaaagaaatgtacaaaggttaaaaaaatatatatggttggccgggcgcggtggctcacgcctataatcccaacactttgggaggccgaggcaggcggataatgagatcaggagatcgagaccatcctggctaacacggtgaaaccccatttctactaaaaatacaaaaacaaaattagccaggcgtggtggcgggcgcctgtagtctcagctacttgggaggctgagtcaggagaatggtgtgaacccaggaggcggagcttgcagtgagccgagatcgtgccactgcactccagcctgggctacagagctagactctgtctccaaaaaaaaaaaaatatatatggttcacacaaaaattatatcctatgttgttctctataaacatcccatcatattatgtctcccagaccactgacaatttttggaagcctcactctgccatctcgtgaaatgtcctccacagtcccctactgttggacacttaagctgttcccagttgctaagacggagctgcagggacagcctcgcgttttaagctagatttgcttttatgtaacaattacttctacatcattcactatgtgttaagtcctatctctgggcactttgcaaatatcaacttatttcatgctcactccaactcccataaactccccattttgcagatgggaaaacggaggttctgtaggttgaagtgacttgcccagggtcacactaccaggatatgaactcaggctggacaggtcctgtcagtgccctgagacgcccttttccttccctacggtagagacccaggagctaaatcactctgtcaaaggggaacaaaaattcttgccagacatggtggctcacacctgtcatcccagcactttgggaggccaagacgggtgagttatgtgagcccaggagtttgagaccagactgggcaacatggtgaaaccccatctctactaaaaatacaaatattagctgggcatggtggtacatgcctgtagtcccagctgctcaggaggctgaggtgggaggactgcttgagcccaggagttggaggctgcggtgagccatgatgaggccactgcactgtggcctgggcaacacagtgagaccctgtagaaaaaggaaagaaaggaaagaaaagaaagggaaggaaaagaaagaaagcaaatgaccatgcaatgaattttacagaaatgcacttggtaggggacccatcccattcctcagcctttgaccaagaaacatatgtttttattttattttaattaattagttaattaattttttgagacagagttttgcctcgtcgcccaggctagagcgcaatggcatgatctcggctcactgaaacctctgcctcccaggttcaagcgattctcctgtctcagccccctgagtagctgggattacaggcatgtgccaccacccccggctaatttttgccttgttagtagacacagggtttcatcatgtctgccaggctggtctcgaactcctgacctcaggtgatctgcctgcctcagcctcccaaagtgctgggattacaggcgtgagccaccacacccagcctattttatttatttttgagacagggtctcactctgttgcccagcctagagtgcaacggcacgatcatagctcgctgcaacctctgccttcagggctcaagccatcctcccacttcagcctctggagtagctgggaccacaggtgtgcaccaccatgcccagctaaatgtttgtattttgtgtatagacgtggtcttgtgtcttgtcatgttaccccagctggtcttgaactcctggcctcaagcaatcctcatgccttggcctcccaaagtgctgggatgacaggcatgagctaccacgcctagccagaagcaaatattcatataaaagttcctccatgaggccggatgtggtggctcacacctgtgatcccagcactttgggaggctgaggcgggcagatcacctgaggtcaggagtttgaaaccagcttgaccaacatggcgaaatcccatctcgactaaaaatacaaaaattagccgggtgtgatggcgggtgcctgtaatcccagctactcaggacgctgaggcaggagaatcgcttgaacctgggaggcagaggttgcagtgagcctagatcgggccattgcactccagcctgggcgacagagtgagactctgtcccaaaaaaatacataaaagctcctccaggaaggttcccagcaactttgtgagagtccaggacagcataacaccccctctgccatatctaatcgtaggtcaatgggcaagcaaagcatcatacatccatacagttcaatccccatccccagtaaaagaatgcacagtcatacacagaatcacatgaacaaatctcagataatgatgccgagtgaaagacaccggacactaagaatgctgctggccccagctatgctcatctgcttccttattgcctgtggctgcttttgagctgcagtggcagagttgacgagtgagttgctttggatagttagtaactctccaggcctcagtttctgcatctgcaaaatgggggtgactgctgggcatggtagctcatgcctgtgtttccagtgctttgggaagctgaggcaggagggtcgctggagcccaggagttcttttgaggccatcctgggcaacacagggagaccctatgtctacaattttttcgagacagagtcttgctctgttgcccaggctggagtgtagtggggtgatctcagctctctgtaacctccgcctcctgggttcaagcaattctcctgccttagcctcccaagtagctgtgattacaggcgcctgccaccaccaccacgcctggctaatttttgtatttttagtagagatggggtttcaccatgttggccaggctggtcttgaactcctgacctcaggtgatccacctgcctcagcctcccaaagtactgagattacaggtgtgagccaccatgcctggcctacaaatcttttttttttttttttttttttttttttagccaggagtggtgacacacctgtggtcccaatggctcaggagtctgaagtgggaggatcactttagcctgggaggtcgaggctgcagtgagccatgatcatgccattgcacaccagcctgggagacagaataagaccctatctcaaaaagtaataataataattattatatatgtacatataatatataatacatatatgagatttttgaaaattatgttgttttagagatggagtctcactgagttgcctaggctggagtgcagtagcattcatagccatgatcacagcacactacagcctggaactcccgggctcaggtgatcctcctgcctcagcctcctgaatagctgggactacaggcctcgccgctgaactaggtcttttatttatttatttatttatttgagacagagtctcactctgtcgcccagggcagagtgcagtggcgtgatctcggctcactgcaatctccgcctcccgggtttaagaggttctcctgcctcagctttccaagtagctgggattacttcgaactcctgacctcaagtgatctgcccgcctcagcctcccaaggtgctagtattataggcatgagccactgtgcccggccgtttttgccttttgcatagcacagtcataaatatcctgggtcatgtttcctgtggatatttatctaggagagcaaaggctatgttacttggtgcatgcatgttcagcgttgtggctgatgtcagtctgtcttccagagagactgcagtgtggaagagctttgtgtatccatggcttctgacacttgctattattggacattttaaactagggggcagtgaaaggggagtaaaaaggggcctgtgactttatcatacatgtcctggattcctaacaacgttggacatctcttcatctatttgtcggatgctcgtgtttcctgttttgtaatatgccttctcaggctttgcacttattattatttttttttgagatggagtctcgctctgtcacccaggctagagtgcagtggcgcgatctcagctcactgcaagctccacctcctgggttcatgccattttcctgcctcagcctcccgagtagctgggactacaggctcctgccaccacgcctggctaattttttgtattttttagtagagatggggtttcaccacgttagccaggatggtcttgaccttctgacctcatgatccgcctgcctcggcctcccaaagtgctgggattacaggcctgagccactgcacctggcctgcacatttttcttttgagtggttgtcattttcttattggaacttcattctattttttttttaagaaatgggggggcggtctcactatattgcccaggctggtttcgaactgctggcctcaaatgatcctcttgcctcacccttctgagtaaggaacttgattcttcttaaaagactgtatgagattccattggaaggttttcctattctttacggcatgcattctcaacaaggacaaaaattggtttgtggcagggggaggggtgaaaaaaatcttactcttttaatgtaaaaaacacagcagaacactgatatacatatagtatataagcaaatatacaggacatctatgttactaaattttcatgtggggtgattaggaaaaaaatgtctaaaaagatctgtggggtgataatgacaaacaaggtttttttgttgtttgttttttgttttttgtttttttctgagacagagtctcgctctgtcgcccaggctggagtgcagtggcgcgatcttggctcactgcaagctccgcctcccgggttcacgccattctcctgcctcagcctcccaagcagctgggactacaggcacccaccaccacgcctggctaaattttttgtatttttagtagagacggggtttcaccgtgttagccgggatggtctcaatctcctggcctcatgatctgcctgcctcggcctcccaaagtgctgggattacaggcatgagccactgctcctggccccttatttcttcattttgagacacagtctcactctgttgcccaggctagagtgcagtggtgtgatctcagctcactgcaacctctgcctcctggattcaagcgattctcctgcctcagcctcccgagtagctgggactgcaggcacccaccactacgcccgtctaatttttgcattttttgtagcgatggggtttagccatgttggccagcctggtcttgaactcctgacctcaagtgatccaccagcctcggcctcccaaagtgctgggattacaggcgtgagccaccacaccgggcctctgttggttttttgagacaggatctcactctggagtgatctgcccaggctggagtacagtgtcgtgatcacagctcactgcagcttcaatctcaaggctcaagcaatccacccacctcagtctcccacctaactgggactacaggtgtgtgccaccatgcccagctaatttaaaaaatttttttgtagaggtgagttctcactctgttgcccaggctggtctcaaactcctggcctcaagcaaccctcccacctctgccttccaaagcactgggattacaggtgagccactgagcctggccccatatatatatgttttctcaagtttagaataagctcccaaaatttagaccataaaatctgagcctgtcttaggcctgtgccacacaagccaaactgcttttacaattcatacacccattcaagcaatgatgaaaatgcctgtttcactacatcctcaccagtaccgggttttatccatttacaaatctgcagtgacttcgaggagtgccaaaccatggcagattcttattgtttttccacctttctttggtctctgtaaggctgaaccttttaaatatgtttgctcatcaggctgtccctggggaatgttctagagcagaacatcaagttgacccctatggaaaaaggggtcccttcatgtagaggggcagaaatttagttgtgttgtagcctacagttatgcagaaagcagaatttgcaagcagtgcacttggatatgtagcctaggggaatttccagcaaagtgttgaaagcgcagcctggtttcttctctctgcttgttataaaatgtgagaggaaatagacagattgagggaagaagtgtgaagtaaaaaggaaccaggacttgatgatctgggaaattctaagcccattcagatcacaaaagatgctaaaattagatgctcccgaccatcaccacttctcagctccgtgacctcaggcaagtgtctaaacctctctgagattcagtttcctcatctgtgaaatgggctcgatggtaatagcagccacttcagagggctgcggtgaggggtgagtagcttcatgtcaagcacttcacgcaatgccaggcagttgcagggttcgtagggaaagtaatgggtgagaggcgctacaccagtgctccactgtctctacgcccctcattacttcctggctgctatcaacccatccctcccctcccctcctcacccccaggtacctaattcccagaggcaggggagcgggtgaggattcaagctgcggattagcagaggccgattagagacgggtgggaggggggagggagggggggggtctctaacccactaacccttcccttgccggtcctgcctcaggtttgcgggaggggtgggggcctgcaaaacctcggtgcctgccacacccttggagaaagcattagtgtccctgctggttgaccccaggttgacccctctctgggcctcattggttccttctgaactatggggcgaagactgcagaaatgaaatgggaaagcctcagcgtctgaagatgagggcacagggtaaatgcctcagggctggctgagacatccttcgcgtagacaacacttactgagcacctaccatgtgggcagagctgctggcatcaacgtcgcctagaactgctcagctcccagagtgccagactcaacttccagaacccccagactcagccatcgctccgaaggggcgctccgggaactgattctcctcccggggtgccacctgctctcaccctcaccctggcgtcctccctgggggagcagggaaccactcctccaaaggggtccctgaaatcctggatcctcagtgtgtgtggaggggggtggaactggggaaagacagaaggaccatagcagaacccctttcacccgtcaggtcggagcaacactccccccacaccccctgcaacctcccccagctgcgccagacgcagagccggtgggggcgagggggcggcgcctactctgcggctgtcagaggagggggactgcgggagagcgcttgggggggcgctgcggcagccggtcccaacccgcagcggctcgcgcggcaggggcgggggcgctgacccacctcggcccggcccctcctccgctgcggaggcctcgccattaatcctgaccgggggagggggcgcccgctgccccccacttcctacgggggccgctgcgagcgctcccctgccgccccctgcctggagcccctgcgggacccccaggggacccccgccccaggtctgtcgccctcggtgtcggagtctctgtctgtgtccccgtctgtcccgtctccctgctgtgcgtgtgtgtagccgcgtgtcccccggacacctgcagtcaccggccagggctgctcggggaggggtcccgggggtcggcgcgtgagtccctctgaggtctgggtgtctttctgggactgtgcgtctgtgagatctcggggtgccagccccacaggctgcgagtgtgcgtctgtgttgacctcctgcagaaggtgtgtgtcccagatgccccaccggcttcgagcatgggtccccgtgtgcccggcggacacccacgggccgtgtgtccgtcacacgctgtaggcgccgcgcgtggggatctctgcgcgtgtccgtgtgcggtgtgtgtgtgtccgtggctgagtcgaggaggcccggcccgccggtgtccccgagtcgcctgcgcgtgagtgtgtgtgtgcgcgtgtgtgtgcgcgcgcgccgcggcgaaggtggatccgctcgctccgcagcgagcccagccggggccccgcgacctgcagccgccgccgccaccgcctccgccgctccccgggcctccccttgcgcgggccgggccggggatggagccgcagccggagccgccgcagccggggccgcggcgcggagcagcctgaggcgcgggcggtgcgcgggaccggggggagggcgggccgaggggagggtcctgcgggccgggggggcgggcgcggcgcgccccctccctggcgcgctcgctccctcccccgcgcgccctccctcgccgcctcctcccgccgcctgcggcccccccctcgccggggaccgagcgcgctcgctccggcgccggcctcgcctcctcgcagcagcgccatggtacgtcgccgcacccactttcgttttcgcccggggactttttggggtggtgcgtgggctccgggcgaaagttgcaagatctggggggacagggggcgggggccgcccggaggaggggctcgaggcggggacccccactcgccagtcgccacgggacccctacccacgatccccccccgcaccccggctgggggcggagctggcgcgcggggcgccgcgggagaccccaagtggggggcccctcgcgggcgccgcgagttggcgaggagggcggggctccccggagaaggcccccgcaaccccaggccgggcccccgccccctccccgggccagaccccaggcgggagggcgcggccctgggcgcacgacccccgagcgcgcagtccgtgggggagcccgggccagggagggggcgcacggcgggacggcgcgtggggcgggggtcgcggcggcccccgcggggtgccccggcccgggcgagcgcggcgcgccagctagcggaaaatggccgctgcggagaggggcggagagcgcgccgcggccgccgccgggcgccttgaacttggagccgggcgggcggccgcgctcggcgccgcgcaggagcagccgccccgcctgccctcgcaccgcccccgccccgcccctcggcagacccccggccccgctgccgcgcgcgcggggtccccagctgggagggacccccgggtctcggcccggcgcgccccaggccctggagcggcggtggctgcacttggggttccggtgtccggtcgactggcgtcggtgtcgtgcgcacctcgaggggtgcgtgggagcccctgcgctccgtaacgggccggcattggcatctgggggagcgtctggggtgtgcgcggcggggtggtagtgtacctgccttggggccgcgggtcccggcgcgtcggctccgccgctttctgtgtccgcgtgtgtctgcacatccacgtgctggcgcgtgttgtgttgtgagcgccgcccgcattgtgcggctgcgggacacttgtgtctttggataactgggcgactgtgcgcgcgtccctgcgggacggtgttgtgaaactatggctgggctgcgtgtccgcggagccgcgtgtccctgggtgaccgtggggtgtccccgtgtgggtgtgtggcggttggggggggtcgccagggagtggagaactgtcgagtggccgcgttccaggggacagttgggtgccgcttgctgtgtgcgagtgactggcgctgagcctccccctagggaagggtctgccttccactcccggcctcgcctcccccagttccttttttcctgtaactggggactgcctgggcggcggaggaagagcgctccctccaccttttcaaaactctgtccctttatctttcccctacgtcccctccacttcccccagccttcggggtcccccatccgcttggcccgagggggtcctggctggaggttcgggcgcgaggtggcgccgggacgcgatcactcggcacgcagacgtcgctcgccaggggttgcgcttgcgcggggacctgccccgagaggggcggggcggcaggggttccccctccctgagaggccgtggaagtcccgaggggtgggtggttacagcagcacaggggttaggacgggcccgggaggtggctaaggagacccctattatcctatgctggggagagcgtaggggcaccgggactggtcccgcagtcccgcctccagcacttgcccccaatggaccagaggccgtgggcacagagagctgttttgtcacctccagggaaatccccgccgctctccacccccaccccacccccagtgcgtttgatataattttctaaatataaaaagcccaaggccaggctggtctctctcgctttcttcttgacatcccatcatggggggctgtttgggatgtcaagaaggagagaaaaccctcccacaatgacacagaggcctcccccaacaacactcaaggtcattctcgggttgtcaccatccctcacacccactcccagcctcagactcacagctatctccctccgcactcccggagggacggttggatgccctggccttcagcacacggcatggccctctgtccccattttgggttctgtgcacagtgggacacacgtgcatgcagtcatagttacacacacacacacacgacactccctcacggtgcctgtgtctgcatgactctgcacacacaaccacacagagactcacatagacacacacaggcctgtctagagacagacgtcacacacacaggcgtgcacagacacacatgggcagacacactcacggacacaaacaccgcacttgcggggggatagacaaccacatctcaccctcctgcccttccctgtccccaccgcgtttctgcagggccgagagcccagctccaggcagagctggtgcaggaggagcagggaggtggcgtgctgtgtgtcattgtgatggtgcgtatgtgactctgtgtgtgcctgtatgggaataccggggggttccacttgtgggtgtgtgtgtgcttgtaagagtgtgtgcttttgtgtggagtgtgtctgtgattgtggacaagtgcccatgtgtttgtggttgtgtctgcacttgtgtgggggcagctatatccatgcgttgtgcttgtcaagaagcgtcctgtggggagttgggagggtgtgtttgtggctgtgtgtgtgccatgtgggtctgtgtgtgtgtgtgtgtgtctctgctcgcccctctttgaggaggtatctgaggtcaggtgtggggggaaggctgtgatgatatatgggtctgtttttatgtgagtctgtgcgtgtatttgtgtctttgtgtatgtagctgtgtgtcgtgtggagtctgtgtctgcagctgcttgagtctgcacgatgtgtgtctgtgtgtctctgtaggtcgtagtgtgtggtgtgtgtgtctatctgtaccagcctcaacggcctatctgacctttaactcacttgactttaacatcccttcttacagcctcagtttctcatctgtaaaatgggaccacatgggacccttgcaaggttcctggggagctgacattgtgagccccttgctgagcaggtgcggggctaggggaggctgactgcacactgcactgctgtgtaatcatttgcctgcaagattatgtcctttattctctgggtgtggtggctgtggggttaccatggggggctgggggttcctgtctaccctgcctgagctgctctgtgaattgcattcaactttttaagttttcctttaattactgaagccattagtgatcatatgaagaggatacaactgtatccagaggaaaaaaaatccaatctttctgatcacccccattcctgggtggaaccccgctccagaatgttaccatctatagttggagcatttgcaggactgagaaatacacacttatagaggatacatgtgcatatgtgtatatttccataaaggatgtacttgtggaaatactcgtgtatttccataaaggagacatatgtatatgtatgtgtatgtgtgtgtatatatatatatatatatatatatatattttttttttttttttttttgagatggagtttcgctctgttgcccaggctggagtgcaatggcatgatcctggctcactgcaacctccacctcccgagttcaagcgaacctccagcctcagcctcccgagtagctgacattacaggcaccctcgcccatgcccggctaatttttgtaattttagtagagacggggtttcgccatgttggccaggctgattttaaactcctgacctcaagtgatctgcctgcctcggcctcccaaagtgttgggattacaggcgtgagccactacaaccggccaaaggagatatgtgtgtgtgtgggtgtgtgtgcatgtgtgtgtatgtaaaggatactatgtatatttgtataaatacatgtgtactctttaaaaccctaaatgagatcttgaatttccttgctgggtctacagcagtggggtctcagccagggttgattctgttcccatgggacacttagccatgtctaaggacatttgtggttgtcacgactggggggtgcccctggcatggagtgggtggaggccatggactctgctcagcaccctgcagggcccaggacggccccaacccagagagcgatccagccccagtgtccacagtgccaagggggagagctctccagctttctgtccccccacttgtctcttggggacataaccagttgggagccactggttttactcagctgcatagtgtcccagcctgtgttgggattactaaaccggtcccccacagatggacagcatggctgcctccaaattgtgggcattagttttataggtggcagtcaactcttttgtgctcctgtatctgggacagttacagagatgccgaagagtgaaataactgtagagagagtgctttgaaaaaaaaaaaaaatgagccagattgtgctcgaaagtgccaggagctaaatcatgcacccatcttccgggccctccacatgcaggtcccaatctaccaattgcctttttaaagaaactatgacgtacagttccctgttgtaaccacgggcaggtatttgctgacttgcctacaacctggagggttatgagctggcgtcgccccatttcacagagggagagccgaggtgcagagagacgaagctgctgactggaggagacatagacccaagcagcgagcccacgcggcaatttagggaaccaactgtgtgtgctgcgggggtcccttgccacccaaactgggatataggctgctgttcgtacacttgcagaagtttctccctgcagctaccgccaccaataatattcacacagccttcccacatgctatgtaaagactccaaccttccccacctcccaagatgcatcctgttactatagccattttacagatgaggaaaccgaggttccaagaggggcagtctctgctctctaaacttcaccttccaaaggattctaagctgctgaatgaaggctgcaggcagggtggtctgtacaggggagggagggtggaaggcacggggtctggaagtctaggaggagtgtctgaagtcaactgcaacttttaaatatctgtgaattttagatttcaccctgtatgtgtccctagcgtgttttaataaaataaattgcttcacgttatattggtatgtggatttccagatacacttctcaccatttaattcaaatgctccccacagctgcacagtgggtttaaaatacacagacacacacatttatggaccgttcgtgatgtactaagcactgtttgaataatgtcaccgtcatgcagaggggagcctgtggggggcctagggaacctacgctgcaggaattctgctccctcctagtttacctgtcagaccctgggcaagtggcttccgttctctgggcctcagtttcctctcctgtaatgcctgaggataatgggtgctggtatcttctgcgcccctgggcctggggcacctgccccagcttggtgagagggtatcatttgtccttgggaagctcagagagatgaggtgaaatggccaagctttctaagaatgtgtctttagtgaacatttgacccaaggtcaaggctctgctaaggtcattgtccttatccccagcaatcccacaggatgggcatctttaagccactttataggggagaacccttgggatgggaatgagagacacagcagcctctgagctagcctgggaggatccagggagtgaaccgggggagggttggggccctgtcatcagatgccctgggggctcagacggaggcaggccaggtctctgccctgttacgtctagaaggagaacagaatgtgggctccaggtccagatggcctggctccaagccacacttgccatacctcagtcttgagatctgtgaaaagggcacacccctgaggcaggtggaaattattggatacccagggggaggctgcaagggtttatctggccagctggagatcccgcctggacaccgtcctcctggggtgctggagagacacacaggcgaggccacccctcccctgccccttgggtgctgggtgaagagagcaaattctggagcctcccgtgttagcctgggcccttctggccaaggaagggacagctgcacacaagcccctctagctggggacccgcagcccctgcctggctctggggggagaagggagccagggtgctgtgggaccagctcaccgtgcacccagggtcgtacatctttaaggggaaagaggcgcgctggccggcctctgcgcacgtcacttcttcattccttccctcccccctggctctttcctccaacttcccggccagctcgggggtgatgggggggtggggagggggggccttaaaaatccacccctggcccctcaatgtccagaaacaaccctgtcccccctctccgcttgatccgaattggggtcgccctgcagtcctggggtcctggtctagtgccctggggcattgcgtaaatacgggaggagcgggggggtcctgagacgtcgggggaggctctcctttctcgctcgcgcccttttttccctcgtttctttgaaagttgggtgttgagaagtgggaggttcggggtgggagggggagggtgtcagagggtagagagagagacagagagacagagacgggggagagaggaagagagagacggagggagagagggacagagagcgaggcgggcggcgcgagagagggagagcaggagggaggaggagggagaccgagggaggaggcggcgaggagagcgcgccggccgcggggcgggggggggggttggggggggcgggggggtggtttggaaaaatgactcagtaagttcagcgcgcccgctccggccggccctgcgcctcccgccgcgcccgggatgtattcgtccccgctctgcctcacccaggtacggtcctcgcccggccccccgccggcgcccccgcgccccccgcatcccagccccggagttttgaagcaggaggaggcgggacgaaaaaggcgcgcgtccctcccgccatccctgcccgggatgccccccgcgccgagggctggggtccggtggggggatgggtcaggctggggtaccccccccacacccttacctaccgcggaccccctacgcgggactcccgcccagcacccccaaccccgactctcgggacctctcccggatgtggggcttggtctgcagatttgcgtcccccccccacacaccgacgcactccgcacccccgccccgacactcggaaaggtcggggtgggggctggcccccctccagcaagggctctgcgggaagccccccgcctgcctctgagaggaatctagggggtcgtgattggaccctgggtctccccagctggagagaaagggacctctcatgtgttttccccgtgtccccccaccaaggttgtgcgggccgccctggccctcggtcgcctttccctcgttattggcccacgtgtgcatggagggggagggggcaggagaagttggaggcccaggagggggaagggtgctccggcggcccggctgggtcccccctcctttgcaagccccccagcaccgtcccggtattttcgctgcatcgattctggattctggattctggattctggagccgccgccgggaggagcgggaggcccggcgctccgggtctggcccgggcactgcggcgctgcggacgccctcgccagcccggcacctgccccgtcccctccccctccccctccccctcccgtagcctctcacccctggccgcactcccagactgccccggggccgagccttgtgcaatggccgagggggtgtgtggggagggggcggctccccccggggactccttccagcccaggctcccggggaccccgaggtctgcaagttccgttttctagaccgctgctttcctccttacgcagtgtgtctttaggctggagaggttctggcctcagtttcccctgaagtgaggtgcggctaaggccggttctggagaggggacagtatggcgggcaaactgtaaagtcccggcacgtggggggtgcgattccagcgagggccaggcccgtcttaagaagcactgtgtggggagtatatgagtccccggcttccgctccagggcatggtgcagtgagggaccccccacgccaggcatgctccttggtagggtctttctcaccggccccctgcagccgacagggaatgtgggagctggtgctgagggggtctgaggtctgtcctacctgtgatcccctgagtgaccttgggtaagtccctgtcccagcctcagtttccctttctgagcagctttggggggggggttcccgaagaaggcatctctttgaagttctccaagaacaactagggttcgagtgggcacgctgtgtgacctcgggcagcctttgaagtctctgggcttgtggggtgactgaggtgtccccgctctgtcctcaccagctggaaggagccatttgggagggctgagcggaggggaggctgttccaggctggggaggttggaaggctgcctgtgcaccctggaattcccccatcagggctggttgggagacatcctggttgctggggtgggttgggggttagtaagaaccccagtccaggctttgcctcagagaattgctaactcggcctcagtttctccaggaacagggcaaggaccagccaggagggctgtctgtggaaaccaaaaaacggagaggctaaaaactaaaaactatccaggggtgctgcgtgcaagagacagagatgagaagacagagacaggcagagagacagaggcagagagctcccaggccagagtggggacagcgagtcccaagtgcagggggctccctcctcccctgcgattctcctctctgccccgccctccaccccagccctgtagtggagctggggaccccctttccagtttgtcttcagcctgaatgtaatccccactgttcccccaaggcccagcctggtctggggtagccagtggggtgggctgggggactcagaaggaccctgagtgccccatgcaggagcctcccacccaagtcctggctgcctgactcagtttcccgaatcacgtcccctccgtttctctcatcttggtctctttttgtctgtctttctctctttctctctgtcttgctctgactctgtgtgtgtgtgtgtgtgtgtgtgtgtgtgtgtgtctgtttctccctgtctctccatctctgtctctccccgcctctgtttcactcccagtcactgttggtctctttgtgtctctctttctcatcctctgtctctctgatgtctcagtctctcccactgtctctgtctcttcatgtctatctcaccatccctttctcctctttgtctctgcatgtctctttgatgtgtctctgtctctctgtctctccctccctttgccttctttgtgtgtctgtccgatgtgtctctgtctgtttctctgtctctgtctctctgcccccttcctctctgtctctgtttctctccaatatgtctgtctgtctcttcatctctgtctcaccttccctttctcctctgtctctgcgtgtctccccttgccccctctctccctgtctctctctatctctgcatgtgtctccttactcctctctctctgtctctctctgtctctgggcctccctctcccccttttcccagctaattttacaacctgagcccaaccgaaaatagctcccttttagctgatccgacccggatccttctcgggagccgaggctggcggggggtggggggcatctcggtgccagcccgctctgtgccacccgggcccggcccgccgagtggggagtgggtgctggcggccctggggcattctgggagccccgggccgggctcagcggtgactcaagcgctttttcacttttactcttaagaggaactgtgtggagcccatggctcccataaatcctgccggcgggaaggccggcctccccgcgcctgctctgggcctccctccctgcctccctcccgctggcgccaccgccacgttagttattccgggtttggggccaagtccctcttggccgcagcgtggcggattccccgagccacctccatcccgccaccgggtccctgtctcattcgttcgttgtttccttcattcgttcgtcccatgccctctcggagcacaatgtgctttgctgccatttctccagcagggtaaccgaggctgggagaggctgtcctcccaccccagacccccgacctttgttggattttctagatcttccttaagcatctcctgggccctggggataggtgggggtgggggaggcagcagggcccaggcccagtgtaggttcttagagggagcttggggggtgcctaccaggagcagggggcctgcagcccctcagtgccgggagaggggctaagagtcagagagggccagggcctgcccgaggtggcacagtggggctggcagagctggggttcaggccattttccatctggcggcttgggcaggtgggcgctctctccccgtgtgccccccacccggggcctggtggcctctgattcactctctacaaggctccaccactctcccgctgtatctccctctgggtctctctgtgcatctctctctgtttctccccctcccctctctgcggcggaggtgcctctgcgcgccagggccaagcgccctgtaaatcaccaaagctgggattctggcagagtcagcgttctcctctctctctctctctctctctgtctccctccctttctccccccatctcgctctctcctcctctctccctctctccttctctgtctccctttccgtctttccctcttcctttctctctctctccccgtctcccttctctccctctctccttctctcttctctctctctttctccctccctacctccctctctgttcctcttctttctctctgtctgtctctttctttctccctcccttcctctctctctgttcctcctcttctttctctctctctgtctctctgagctggcctccctccctgtctcacaccaaatggatgggaaatgctgcctgggcctcctgccccggacacggcccgccccccactctcctgcctgtgtccacgccgacctcacctgggtgcccatctgccctgagcacacagcgtgcgggcacccaagtcctgaccagttcacatccatgagcacacgctgggcgcacacgcgtgcacactccctgacacccatacggacgaggacacagctctgcctgcctcggatctgccttgatgggggtcaccaacacacagacctagagtgcccctcacatctgcctgaaaatcttgctcaggaggtgccaaacccaatatagtacctggtatagagaaggtgccaaataactgctatagagtggtgccaaataagtgttgctgtgcttgtgattgttgctaaactaattctcctctttcctgactctggtgggtgacctgcccccacccccggaccgtttcttgccctgaaatgaagtcagcagaaacccccacttcctcagggctgctgcagattcagggaggcagcacaatttttttttttttttttttttgaggtagagtctcgctctgtcgcccaggctggagtgcagcggtgcgatcttggctcactgcagcctccggggaggcaggacatttctgaggtccacagtgcagggcttggtactcagtaggtgcccaataaatacctgttgcacgaatgaatgaatgaatgaatgaatgaatgaatgtttttggttgagaggcgggactttggtcttcccgagcctccatttctccgccaacataaaataaaaaacataatggcactttcctcagagacatcgatgtaccttagtccgacacctggtatacagtaggtgccaaataagtgctgctgtgcttatggttgttgctaaactagtaattgcattgaacaccccagaggcattttccagtttccctcccttccctctgtgtgtatttgcgcagcgtaagcccagctttgggctgggtgacaaggacagtggtgacctggaaaggcccaggctcagacccctctctactgtggcatttctgttagtttttcttttctttcttttttctttctctctccttccttccttccttccttccttccttccttccttccttccttccttccttccttccctccctccctccctccttccttctttccttctctttctctctctctccctctctctccctctctctctctctctctctctctctctctctctctctctctctcggagtcttgcactgtcgcccaggctggagtgcagtggcgtgatctcagctcactgcaacctccgcctcctgggttcacgcgattctcctacctcagcctcccaagtagctggaattacaggcacgtgccaccacgcctggctaacttttgtatttttagtagagacggggtttcaccatgttggccaggctggtctcaaactcctgacctcaggtgatccacctgcctcggcctcccaaagtgctgggattacaggcatgagccaccgtgcccggcctctgttagtcttttctccctgcccagccctgtccagggtctccctgagtttgaccagccctgtgtgggtaccagccttccttacacatgggggtgcatggataaggggggtcccagaggcagaagatgggagcattgcttcagtggtctggatgctggagatgctaacagatcaaagctgtgcccttgtgggaccgacagtctaggccgggtcggggacgggcaggaaacgaggtgaccaggactccttgaggatgtggtgtgcgaccgacctcggggatcaaacaaggggaagggaaccacgtgggactcggagagtgtgcacggtgcagaccaggtgtcactggacgctctggcccgagactgtttgctcaaggggcccaggagtggggtgggggggtgccaggaggcccagggaccagtcccagctcagttcctccctgactgtgtgactttggtggaagatttcatgcctcagtctcctcctcgaggtagtgggtgcaatgatagtccccactttcatagtagactttttttttttttgaaacagagtctcgctctgtcgcccagactagagtgcagtagcacaatctgggctcactgcaacctccgcctcccgggttcaagcgattttcccgcctcagcttcccaagtagatgggattgcaggtgtgtgtcaccgcacctggctaattttggtgtttttagtagagatggggtttcaccatgttggccaggctggtcttgaactcctgacctcaggtgatccgcccgcctcggcctcccaaagtgctgggattacaggtgtgagccaccgcgcccggcccctatttcgtagtagacgtgatagctcagcaaacgctcagcctgtaagaggcacagcctcgctccctgcctctctcctccacctcctggcccctctggctcagccctcattgtcctcccagaacatcaaggcacagagggaagtaggggacccagggttcattttgctgactcactgccttggcagagagtttgaaccctgtggactcagtttacccaaattcctcactgtggcccacaaggccctgcccagcctgtccttgtcccctcctcaaccctcccctcctctctctttcccccttgctcattctgctccagccacatgggcctcctcgctgttcctctaacacgccaggtgcggtcctgccccagggcctttgcatgacccatttctccatcagaaagctcctggcctggagtgccatctctcaagactttgttcaggtgtctcctcctgcaagagaccttcctggaccccccccccaagctaaaaaacaccccccaccccagagattctctggtccctcaaactcttaaatttcttcagagcactttgcccaacttgacgttttattacatattttgctgattttaaccatccgtccctgccccagatctggatccaggtgagggccgagcccaggtccctgccaagtcctcggcaccctacctgggaccggcatgcagcaggcactcactaaatgtttgctgagcaacagaatgaatcttccctctctgggagccgttcacatgtccacaggctgtgattttctgagccaggggaaggagcggcccaaggttagagcctgacgctggtgccggatgggcctggggttgtccgtgggaccatggacaagtcatccgacccggagaagaaggcattagaactaaggctttgaaggatgcgtaggaatttgggataagtgctaagtaggtaatgagctagattctcatgaaggattgttgagtcacttttacctggaaacttttggtttggaaattggagtttcttgtcctggtttgctggcctggactttcagggtgggaggagcacagggaggtgagtgagggcatcacccagtgcatggcgtggtcgttcagcaaggtcttgggtccagatgtctctcccagctgctgctgctctctttggccaggaagtcccagtgggctaagctggggtttccaggaaagacctagccttgttccccttctccccatcaccttgcaaggaacaaggtcaccaggcaagctcccctgtctccagcaggctgcaatattcctttctgcccattgtacagaatgagagactgaggcttatctgaggtgatctgttccccagccattcagatggtgaaaatagaccttactgtcacccagccaccttctccgacagtgggtgcctcaactctgggcctcaggattggagagggagaggtgatagaactggatggtcctggctagatctgggaaaccctgggttgaggaggaaaggctgcttgaaggaggggacactagagatagggcgttgagggatgtgtaggagtttgggaggattttcagcatctagcttgtcttggttatctcttttgccggttgggcctctgagggcagtaggaggtccctggggaagaggccctggttattgcaggtcatgtgggagaaacagagtgacaaccggccaaccaggccctgcctctcacgtggtctgatcccctggggaggacaagggaggatggggcagcaggtccatgacccagttacaagctgtttgtcttcctgcctctgtaactagccggggtcaccactgacgtgggcccccacccctgcccgcctccctggcacctgtccccggaaagggcacagagaaggggaggaacatagagaagggagggacagttagggaggaggaagggaactcagatctacgaggggccagatgagaaaaggaattaagaggagaggggaagtggggagggggaattcagagagagaggggggttggggagagaaggagttggggggacagtgatccctgcccccatcatggatgcctcccctgtcccttccagcagcctcttatcacagccccagtaagcgccagagcttgggtggcagccacggccccagctggacaacattgtccgggcctcctgcccgcctggcatctcctccacaggcaggtcctgcgcctctatgggtcctctctgccgcgtcccactgtgccccccaccacccccactgcccggcttccctggccagaccatctgggctctggtcccagctctgctgaccggctgtgtgaccctggacaaaccactccccatctctgggtctcatccagtcaggggcagggacgagattggacagggcctgggccgggccccctccacctcccctttgccttagcaggttggctggggaagcgggggcagcggaaaagggccctgaggtccggtccccgccgcagctgttacggtgactcacgctttgggggacattggggtgggggagcttcgctggtacaagctgactctggtctcactgggtggggaggctattttcagagcctcagtaataggtgaaatctgatgtcctgcccctccccccgaagcaccccacggccggaggtggcccaaggggacgtggagcacagagcagggagggtgatctggcagcagctgctctgcccatcccggcctggaaatgggaccgagtccagccacatccgctggcacacacagtgggagtccagggtcaacgtctccctaccttcctgagaccccaatcttacagagaacaggctgttctgagaaagggacccgtggccttccagggggtcagggccctgattcttatcctcacaccggccctgagaccctgtgggacctcagccaggtctccgcccctctctgagccttagtttccatgccacagaacacggagcggggcctcaggctgttccctgcttcctggaagattgtctgcaatcaaaatgatcatcgcagcaatcgcgtccatagtaatgaaaataccccagcatcttagaggggccgaggcgggaggatcgcttgagcccaggaattcgagaccagcctgggcaacatagcaagacccccatctctactaaaagtacaaaaattagctgggcatggtggcgcacctggaatcccagctactcgggaggctgagacatgagaatcgcctgaacccaggaggcggaggttgcagtgagctgagatcatgccaccgccctccagcctgggcaacagtgtgagacactgtctcaaaaaaaaaaaaaaaaaaaaaaaaaaaaaaaggaaagaaaatagaaaatatcccagtgccttaggaggccgaggtgggaggatcacttgagcccaggagtttgagaccggccaaggcaacacagtgagtgagactccatctctgcaaaaataaaaattagccagacatggtggtttgcacctgtagtcccagctactcaggaagctgacgtgggagaatcgcttgagtctgggagttcagggcccaagtgacctaagatcgtgccactgcactccagtgagacgcctgtcttttttatttatttatttatttattttgagacggagtctcgctcttgttgcccaggctggagtgcaatggcgcgaccttggctcactgcaacctctgcctcccgggttcaagtgattctcctgccttagcctcccgagtagctgggattacaggcgcctgtcaccatacctggctaattttttgtgtttttagtagagatggggtttcgccatgttggccaggctgatctcaaactcctgacctcagatgatccacccacctcggcctcccaaagtgctgggattacaggcgtgagccaccacaccaggctgagacccccatctcttaaaaaaaaaagtaataaaaatcacagtagccccagcactttgggaggccgaggcaggcggatcacgaggtcaggacattgagaccatcctggctaacacagtgaacccccgtctctactaaaaaaaaaaatacaaaaaattagttgggcatggtggcgggtgcctgtagtcccagctattcaggaggctgaggcaggagaatggcgtgaacccgggaggtagagtttgcagtgagctgagatcgcatcactgcactctagcctgggtgacagagcgagactctgtctcaaaaaaaaaaaaaaaaaaaaaaaatccaatagcaatataagttgtaatgataacaatcatcgcatcattaataacaatgtagtcctttgagagctggggggaggaaaacagctttctgtgctaggaagggatcacccctgtccgaaatgcccagcccagcctggtcaaggcagggagatggaaaggcagttttgcttctctttctcttcttgttccttgtatttattccaccttgaggctgagaaactaggtcccagatgtttttaatttgttttattttattttttatttttttagagacagggtcttactctatcccccaggctggagtgcagtggcacaatcacagctcactgcagcctcgacctctgaggctcaagtgatcctcccacctcagcctcctaagtagctaggactacaggtgtgcgccacagcaactatgcccaactaattatttttgtaatttttagtagagacggggtttcgacatgttggtcaggctgctctcaaacacttgggctcaagtgatctctccacctcggcctcccaagtagctgggactacagacgcgcaccacaaaaattatgcccagctaatttttgtaattttcgtaaagatagggttttgcctgccggccacagtggctcacacctgtaatcccagcactttgggaggcagaggcaggtggaccacctgaggtcaggagttcaagaccagcctggccaacatggtgaaaccccatctctactaaaaatacaaaaattagctgggcatgatagtgtgtggctgtaatagtgtgtgcctgtaatcccagctactcgggaggctgaggcaggagaatctcttgaacctgggaggcggaggttgcagtgagccgagattgtgccactgcactccagcctgggtgacaagagtgaaactctgtctcaaaaaaaaaaaaaaaaaaaaggagatggggtttcgccatgttgcccaggctgggattgaactgggctcaagtgatccacccacctcagcctcccaaagttctgggattacaggcgttagccatagtccccagctgagatcccaaatgctatgcagactcagtttcccttgctggaaaatgggaagaatgggaggggcctccccacacccagacagggagctgggggcctcccactgccccacatttctcttcaaggggctgctgttattttcgtggggaagtcagatgagtgcaggttccagtccacctctgtcccccatggccgggttccccctcaaggcctcagtttcctcatctgtagcatgggtgttgtgactgccctcagacaccaatttgtcatgatttgggagtaggttgaagtcccagctctggcccagtctcagcgccttcccagccctcggattttccatctccagggtgggtctgcagggaacggggtggcccctctccccagttctgaacctttgtggctgagcgtctgcttctctggtctgtttctgtatcagcacagtgggttcatggaaaggggaaaggagggagaggactccacccgggatttctcctccctctgattaatcctggtgcacttgaatctcttatcttttgatgcagaaatccccccacccttccagcagccctcaacctccaggcgggcctagtgtctgcctgtggatctcagccaggcctgtctgtacatatgctctgtaggaacaagctttcgtagtcattttttgtttttttgttttttgttttcccaagatggagtctcgccctgtcacccaggctggagtacagtggagtgaccttggctcactgcaacctccacctcccaggttcaagcaattctcctgcctcagcctcccaagtagctgggattacagtcatgcgccaccacgcctggctaatttttgtatttttagtagagacagagtttcaccatgttagccaggctggtcttgaactcctgacttcttgatctgcccgcctcggtctcccaaagtgctaggattacaggcatgaaccaccgcgcccagccgggttttttttttttgagacggagtctcactctgtcgcccaggctggaatgtagtggcgagctctcggctcactgcaacctctgcctcctgggttctcctgcctcagcctcctgagtagccgggactacaggcgtgtgccaccatgcccagctaatttttgtatttttagtaaagatggggtttcactatgttggccaggctggtgtcaagctcttgacctcaagcgatccacctgcctcagcctcccaaagtgctgggattacaggcgtgagccactgcgcccagcctcatttttcatttttttttatttctttctttttttttttttttttttttttgagtcaggagtcaggggtctcactacgttgtcacccgggctggagatcaatggcgcaaccttggctcactgcagccttgacctcctgggctcaattgatcttcccacctcagcctcccaagtagttgggactgcaggtatgcatcacctagctaagttttgattttgtagaaacggggcctcgctatgtcatccaggctggtcttgaactcctgggctcaagcagtccacccactgtggcctcccaaagtgctgggattacaggtgtgagccaccatgcttggccgccgaccctagtttttttttgttttgttttgttttttgagatggagtcttgctctgtcgcccaggctggagtgcagtggcgcaatctcggctcactgcaagctccgcctcccgggttcatgccaatctcctgcctcagcctcctgagtagctgggactacaggcgcccgacaccacgcccggctaatttttttgtttttttttcagtagagacggggtttcactgtgttagccaggatggtctcaatctcctgacctcgtgatctgcccgccttggcctcccaaagtgctgggattacaagcgtgagccaccgtgcccagccttgttctttttttttttttttttttttttttgagacagtgtttcactcttggcacccaggctcccaggctggagtgcagtggcacaatctgagctcactgcaacctctgcctcccaggttcaagcgattctcctgtctcagcctcctgagtagctgggattacaggtgtgctccaatatgcctggctacatttttttgtatttttagtagggacggggttttgccatgttggccgggctggtctcaagctcctaacctcaggtgatccacctgcttcggtctcccaaagtgctgggattacaggtgtgagccactgcgcccaggctttttttttttttttttttttttgtgacagtcttgctctgtcgcccaggctggagtgcagtggcaccatcacagctcactgcagcattaaactcctgggctcaaatgatcctcccaccccagcctcccaactagctgggactacagttgcaaaccaccatacctggctaatttttgtttttttgattttgtttgttcatttgttttgtagcgatggggttttaccatatggctcagactggtctcaaacttctgggctcaagcagtcctccctcctcggcctcccgaagcgctgggattacaagtgtgagccattacacccagcccaaccctagctgcaataggcagagaataggtccctgacatctttgttctcccaacctcagttttacccgtctgtacaatgggttgtccatgagcctccacctggcccccttagcttgctccatctgcatgctggggttcaacataggtcctccacggctgggcatggtggctcacacctgtcatcccagcacttggggaggccgagagccgaggcgggcggatcagaggtcaggagatcgagaccatcctggccaacatggtgaaaccccatctttcctaaaaatacaaaaattagctgggcgtggtggtgggcatctgtaatcctagctactcgggaggctgaggcaggagaatcgcttgaacccgggaggtggaggttgcagtgggccgagattgcgccactgcactccagccttagcgttaagagcaagactccgtctcaaaaaaaaaaaaaaaaaaaatgatcctccacaaacttccgccttgatttgtgcctctcacatagtccaagtctgtttgctcatctgggcgatgggttcttgcaggtccctgataaacttctcctgggtcccccgggccttttgcgtgcctccggcggcgtgcacgggtccgcagcgaccccctgcccacctctgcccagcccctcccactctgcgggtctgttcagggcccctccgacctcagccttcggggccgggcagtgggtccgccctctgcgtccctggcgctcctgacctctcgcctctccggcctgcaggatgagttccacccgttcatcgaggccctgctgcctcacgtccgcgccttcgcctacacctggttcaacctgcaggcgcggaagcgcaagtacttcaagaagcacgagaagcggatgtcgaaggacgaggagcgtgcggtcaaggacgagctgctgggcgagaagcccgaggtcaagcagaagtgggcgtcgcggctgctggccaagctgcgcaaggacatccggcccgagtgccgcgaggacttcgtgctgagcatcaccggcaagaaggcgccgggctgcgtgctctccaaccccgaccagaagggcaagatgcggcgcatcgactgtctccggcaggcggacaaggtgtggcggctggacctggtcatggtcatcctgttcaagggcatcccgctggagagcaccgacggcgagcgcctggtcaaggctgcgcagtgcggtcacccggtcctgtgcgtgcagccgcaccacattggcgtggccgtcaaggagctggacctctacctggcctacttcgtgcgtgagcgaggtgaggtgtggtggcctgagcggagcggccagcggggagggtgtctgatggtggtgacacggggccaggagggcctgagggaggaggccagtgcgtgtgggtatgatgtggtggtctgagaggggaagtgggccttggagagtgcccaatgggggcgacacggggcacggagcatctgagggaggaggctggtgggtatagatgtgatgtggtggtctgagaggggaggcgagtctaggagaatatgtaaagtaggtgatatggcacaaggagagtctgagagaggaggccagtgcatatagatgtgatgtggtggtccaggcagggcagcaggcctgggagagcatctgatgggggtgacatggtgcaaggagggtctgagggaggaggctggtgcgtgtagatgtgatgtggtggtccaagcggggaggcgggcctgggagagcgtctgacgccgggtgacacggggcaaggagggtctgagggaagaagccagcatgtgtagatgtgatgtggtggtctgaggggggaggcaggcctaggagagcgtctaatgcaagtgatatggtgcaaggagcgtctgagggaggaggccagtgcatgcagggcccagggtggctgctgatgggatgtggaggtcagatggaggaggcaggcctagcagaggtctcaagtgagagatggtacaaggaggtttttttgacagaggaggcaggtgggctgtggcgctccaatggtagaggcaggatctcaccctcacgtctgagggaggaggcaggaaggcccttgaggtctcagggggatgagaatgtcctagatggtcttgggcacaacggacggccttgctgggagcaggggtgaggagaggagagggacaggccatcccagccctccgaggagagccaagagagtcctggcaccgctttctgtgaatgcttgttggttgattgactctcagaccatgccagcagaggcctgatgagcctggccctgccagaggggtgtttgccggtggtcaaatgcctgatgttgagaccagctagctctgtggggttgaggaaatccaaggcggcttcccagaggaggaggtgcagctgagctcagctctgcaggatggccaggccacagtgaacaaggagatgccccaggggtcctggcaggagcgtggagatgagaggcctgatgcctgtgcctctggtcccggtgctaagagcagggttggtcctgcagcttcttggctgcgtggccctcttggacttcagtttctcttgcctgccaaatggtggagatgatcagtctgtagctggatggggctatgggaggttccagaagatcatgcgtgtagccacgtgcgaggtgtcagctgcatcccaagacctgagtgggtgcacagcacacccctgccatgcccatccaggccgtgtctggagcacgcgtgaacccccacacacccaggggctgccagagcatgtgggatgggtgtacgccagacgcagacccacacaggtcaccagcccagccccagcccaggcagcactctatagaaacaggcagttgcacagcctgagagggaggggcatttgcccgaacaggaggaccctggggccagactgcccatgctccagacacagcccttcttttccccagctgtatggacacatcccttttctgtgcctcagtttcctccttggtgcaatgggagtaacagccatgccaccttctagagctggtgcaagggtgagacagggtcacgggctcccaggctctagggtgtgtggaaagacagcagggcagagttacccagtgtttttttttttttttttttcctggagacagggtctcgctctgtcacccacgctggagtgcagtggtgcaatctcggctcactgtagcctcgacctcccaggctcaagcaatcctcctgcctcaccctcccaagtagctgggactataggcgcacaccaccacacccagctaatattttatatatatatatatttttttgtagagacagggtcttgctatgttgcccaggttggcctcaaactcctgggctcaagccatcctcccaccttggcctcccaaagtgttagaagtacagcaggcaagagccactgcaccacaccagttacccagtcttttttttttttctttctttttttggagatggagtttcgccctgttccccgggctggagtccagtgacgcaatctcggctcactgcaatctccacctcccaggttcaagcgattctcctgcctttgcctccccagtagctgggcttacaggtgactgccaccacgcctggctaatttttgtatttttagtagagacggggtttcaccatgttggccaggctggtcttgaactcctgaactcaaacgatccactggcctcagcctccccaagtgcggggattacaggcgtgagccaccgcgcccggcagttacccagtcttgatcttgattctttgaccttgaccttagcatctttctcctcccccacccccactgatgagcaacaaacctgctggggttggctgtgagggggcactggggacggtgggggcagagaggtgggccgggtgactgcctgttgggagcaggggccaccgtggggacggaggttctcatcgtcacacagggccagacctctctgccaccacacatcttcctcgcccggggccccgcccccacctcctccgtgctgagctgatacaattttgaagcgagcttttctgctgcagtcagcacaacctctgggcgcctccccacccccaccctgcccctcccgcctctgctcagcaggcaggcctgtgccccaggtcaggttggcctctctgagtgaaggctgcaccctcccttgcccccagcctgcccccttcatccccaagggaatccctgcttcaattggccccagcaggccacaccctcccccaattggccccagcagggcacacccccccccaaccctcccacctgcccactgcgggtgctccagctcctcatgggggtaagagctgggcctggactccaaccccagctcagctgcccactggctgggtgatgtggggccagtcactcaccctctctgtgcttcatttccttgtctataaactggggggctcaaaactggttgccttgtgggaaatgtcaagtgcccagggtgagagctcagtaaaccacccacaaggcatcgtgaagaccaggcactaggcagggggctagggcccttggtggttatcgttactaacattatcctcttcgggattggtttgtttgtttgttattattggtttgggttttttgggggtttttttggttgttgttgtttttttttttttttttgagacagactcttgctctgtctcccaggctggagtgcaatgacgcaatcttggctcactgcaacctctgcctcccgggttcaagcaattctcctgcctcagtctcccgagtagctgggactacacatgcccaccaccacacccggctaatttttgtatttttaatacggacggggttttgcatgttggccaggctggtctccagctcctaacttcaggtgatccacccgcctcggcctcccaaagtgctgggattacaggcgtgagccactgcaactggccttgttttttgttttttgcagagatggggtatcactatgttgcccaggctactctcgaactcctgggctcaagtgatcctcccgccttggcctcccaaagtgccaggattacaggcgtgaccccctgcgcccggcccatcctcctcattctgattataatctcccactgccagacctttccttatgcattccctggacatagaatgtctttcccatatggaaaaccccaactccggctgggtgtggtggctcatgcctgtaatcccagcactttgggaggccaaggcaggtgactctcctgagctcaggcattcgagaccagcctgggcaaaatggcaaaaccccatctctaccaaatatacaaaaaattagccacctgcctggctgaaaattctttcccattctcacagctgccctgtgaggcaaggatcattgctgtatgccttttttttttttttttttttttttttgagatagggtctcactctgtcacccaggctggagtgcagtggcgcgatcttggcttactgcaacctctacttcctgggttcaagcgattctcatgcctcagcctcccgagtagctgagattacaggcgagcgccaccacacctggccaatttttgtatttttagtagagacgggctttcaccatgttggccagggtggtctggaactcatggcctcaagtgatccgccctcctcggcctcccaaagtgctgggatgacaggcgtgagccaccgcgcccggcctgttgtacgcattttacagaggaggaaacagaggctcagaggagggatttgacctgccgtggtcacacagccgagactgggccaggtgggatttggacccacaagcagcttctgcctctgccctgtccttgacacctgcctcatcctccattattgtcagaaggggatgggcggaagttgtggtgcgtgagggggcagtctgctggcacggtgtggtcaccttctggcagggttgtgtgagggccccacaggctgaggtcttatgtagggtccccaggctgtggctggcctccaggcctcagcgctgatcccagtggttgtcaccctgacagcaggaagactggccaccggcttccttttccgaaccgagagtccccttggctgtggagcgtcctggcccagccagagtgcagtgtctggctttcatcagccctgctgggcagctgaggccctgggatagagggagagggagggacgggcatcaggcatagggccttggctggcctcttggaggggtgcagggtggatggcggtggaggggcacctgccatggggctgaaaggagccaccacttgcaacgtcacaagtgagagaggaggccgggcacagtggctcatacctgcaatcccagcacttcgggaggccgaggcaggcggatcacctgaggtcaggagtttgaggccagcctggccaacatggtgaaaccccatctctactaaaaatacaaaaattagccgggcgtggtggcgggcgtctgtagtaccagctactcgggaggctgaggcaggagaatcgctggaacccgggaggttgcagtgagccaagatcgcgacactgcactccagcctgagcgacagagtgagactctgtctcaaaaaataaaaattaaaattaataagaagagggtgtcagggaactgcaggaaaataaagcagggagggacatggaggggggctgggggccactctggatggggagggcttctctgaggaggcgtctttgaggtgaggcttgaagggggtgagggagtctggagaggctgggtggagggagcagtgagggggttatagccagtgcgaaggcctggagcccaggagcagcacatggagctggctgggatgttcagggggtagtgagtggcgagggccgtcctgtggccttccagtgagggtgaccagccgggggtggggcgggagagggtgacccgggtgctctccgacctgccacgtgctggggaaggagcctgcaggaaccagggcccagagagggaagctgtctgcccgcccagggcctaaacccagccaggcctccccgccccctctggcagcccaagaaatctgaggcgcgggcgggcaccgtgccagggctgggcgggggaggggctgccaggcccgcccgtcccagcagctgccagcccgccccgagccgccagcccagatggtgcccatctgctgacgccgccatgggccagcctcctgttcccgccttgcgtcgtgccaagctcctgcagtccagcgccgggaatggcgcggtgggcagagcccggcccgggaagctcatagcacgccagagaggctgccccgggtgccctggagagggtggcaggagaaacatgggagggggagttccccagcgcttcctggatggaattggggagcaaggaccccaacagcgataatgatggcggcaaacacacatggcgtgccctctgtgtgccaggctccgaggccaccgctcaccctaactggtttaattctctcccccatccaagcaggaagggactttggccttctctcgtgttctagtggaggaagcagagacccagaggtttggacaagagtcacttgtccaaggtcacaaagctcctcaggggcagagccggaatgagaatccagaacccctttgaaaaagggattgaggccaggcgaggtggctcctgcctgtaatcccaacactttgggaggctgaggcaggaggatcacttgaggccaggagttcgagaccagcctgggcaacatagcacgaccatgcccccccccaacaaaatttttaaaaatgagccaggtgtggtggtgtgtacctgtagtcccagctactcgggaggctgaggcaggaggatggcttgagcccaggagttggaggttgcagtgagctgtgatcccaccactgcactccagcctgggtgacaaggcaagaccttatctctaaaaaccgttttttttaaggggtgattgaggccaggtgtggtggctcacacatgtaatcccagctacacaggaggctgaggcaggagagtcgcttgaacctaggaggcggaggttgcagcgagctgagctcatgccactgcactccagcctgggcgacagagtgagaccctgtctccaataaaagggaggtggtattgaaaccccttaaacctcttttcaaaaacaaactaaaagtgccctttgaggttatctagtggaagccacaccctctgagtcatacagatcatacagtgcaggccgtgcacactcagggagtaaatgaatgaatgaatgaatgaatgaggtgaaccctatggaaggggaccaagcctggggccagggtgtccataaagctcaccctgagcttgatggcaggagaaagggtctcaacctgggagtgagggacctgggtcagccacagtgctgccctggcttgctgtgtggctttgagaaaagtcctgccctctctggtctggggttgaggggagtggagggtgggaaggggcggccttgtgggccacagacaggagcaaggcgggtcttcactgaaagcctcccgtcctcttctgcctttattgatcttcatcccggttgtgggtgctgcactggggagacaggccatgagctcgggtgacggtgcctgtttatttgtatggtggacagaatttgtgttcctgtgtgctccaggcagtgtggggcgcattcttctctttgagccttagtttttgcctctgtagaatggggagaatcagagctgtgcccattgcattaaagattggagtcagtggtctctgagaagcatacaggaggcactcaataaatgctcacttccggccgggcgcagtggctcacacctgtaatcccagcactctgggaggcccaggcgggtggatcacctgaggtcgggagttcgagaccagcctgaccaacatggagaaaccccatctctactaaaaataccaaaaattagccaggcgtggtggtgcatgcctgtaatcccagctagtcaggaggctaaggcaggagaattgcttgagcccgggagaaggaggttgcggtgaaccgagattgcgccattgcgctccagcctgggcaacaagagtgaaactctgtcccaaaaacaaaacaaacaaacaaaaagaatgctcatttcctccctggattctctccccaaccccaggagggaaggagggaggtcccagtgccgccgtgaaaccctacacctccttttcccaacccagtgagccagtgggggcaccgtgacccaggagtggctgtcaccagaagctggaccaagtcaccctttccaggtgtctggacagcagaggggtgaggggttcctggcagcagcagcctgttatcccccagggctgggcagccaggtgtgccagccgtctgtctgtgcagagaaggtggctgccgggcgtgagtcgcagacgccagctgatggtgtatttatagcaacggcaggagtccgcggggcatacgtcagtggtaaagagggacgggcaggtgggggtccagctcccacagcagacaagagcccaccaggactggccagggagctgaacagagtgtcagggagaatgaggggcatgttgtgcagccgggaggcccaggatcacacccctctgctctggaactgcgtgatgtttgacaagtgacattgcagctgtgggcctcagtttcctcccccatcaaatggggatgataataatcctgcccacctaatagggctgcataggatccaattagtgcatgaaaagcatgaggacagggcctggtatacagtaagcactcaaaagtgatttgttgcctaaaaaagggagggaatcccaacatgggccacaatgtggatgcatcttgaggatgtcacactcagtaaaataagccagacacagaaggacaaatcctgtgtgattccactcctaggaggtccatagagtcgccagattcacagagacagaaagtaggatggggggtgccaggggctggggagggggctggggagagaatgtttcatggggacggggtttcagtttgggaagatgagaaggttctggagaggatggtggtaatggttgtacaaccctatgaatacgcttaatgctgggttaatgccactgaacttagaaatggttaaaagagaggcaggaggattgcttaaggccaggagttcgagaccagcctgggcaacacagcgagacctcatctgtacaaaaaatttaaaaattatctgggtgtggttgcacgcacttgtgttcccatctactcaggaggctgaggcaggaggatcgcttgagcccaggagtttgaggctgcaatgagctatgatcacaccactgcactccagcctgggcgacagagcaagacttgtctcaaaaccagaaccacccccaccaaaaaatggtaaatttatgttatctagattttaccacaatctaaaaatgtagttctggttgtgaataatgataataacaagtaataatattatatctatggccggctgtggtggcttacgcctgtaatctcagcactttgggaggctgaggcgggaagatgacttgaggtcaagaattcgagaccagcccagccaacatggtaaaaccctgtctctaataaaaatacaaaaattagccagtcgtaggccaggcgcggtggctcacacctgtaatcccagcactttgggaggccgaggcaggcagaccacttgaggtcaagagtttgagaccagcctggccaatatggcaaaaccccgtctctactaaaaatacaaaaattagccaggcatggtggcgcgtgcctgtaatcccagctacttgggaggctgaggcaggagaatcacttgaacccgggaggcggaggttgcggtgagctgagattgcaccactgccctccagcctgggcaacagagtgagactccgtttcaaaaaaaaatgttatatatgtaacaatgtaataattagtaatatgtcatatataatcatggaacaataaataagaaaaatagtgtctgcggtgacagcacagtagttattattgtcgttatcatgatcgtcatcactgtggttctcgtccagctctgccctgcagacagctgtgtaaccctgggtgagtttcttgccagctctgtgctttactgcctcatctgtgaattgagcatagggggtgcctagcaatttaaatgagataatagctcttttttttttttttttttttttgagatggagtcttgctctgtctcccaggcaggagtgcagtggtgtgatcgtggctcactgcaacctccacctcccgggttcaagtgattctcctgcctcaacctcccgaatagctgggattacaagctcatgtcaccacacccggctaattgtggtatttttagtagagcgggggtttcactatgttggccaggctggtctcgaacttctgacctcaggtgatctacctgccttggcctcccaaagtgctgggactacaggcgtgagccaccgcacccggcctaaatgagataatatctatgaaaaaactaaccctttgcatgtgatgagtgctgggaactggtaggctctttgaggagtaggtcctcccaccaccccgcagacgcccctacccagcagaatgctggtttctgcatgaatgcatttgtgtggggactcccgagacagcccctgagggagccctcattcacccgggtggggcccggccctcccagagccagtgggagggggaggcgccttgttgcacctgtgatgccccccgttatggctgggctgcagttgtcaccctggccctgtgcctgggaagccaaggggaggctgagggcagctagggacagctctgtgcccacggccccctccagccagctgccaggccagccccctccctccagctgggcgagggcaggaagtcacagatggtcagggttggtgaggggtgaagcagagggcatttggggacaccggatgtctcgtccagatggggaaactgaggcccggagaggggcgaggcattgccccgagttgcccaggaagggccttggctcttgtcccttctaagtcccatctttatttttattttttattttttggagacggagttttgccctgtcgcccaggctggagtacagtggcgcgatctcggctcgctgcaacctccgcctcctgagttcaagcaattctcccgcctcagcctcccgagtagctgggattacaggtgcccgccaccacacccagctaatttttgtatttttagtagagatggagttttaccatgttggccaggctgacctcgtgatccacccacctcggcctcccgaattgctgggattacaggtgtgagccaccgcgcccagactaagtcccatctttaggtccgcttggctgttccacggccacctggaggggaggtagggccagcaaggagggaccctagggtctcagggcagaagatctgccggaggagagggagaagggggttctgaggggaggaagacgcgagaatctcaacgctgaagtggtttctagattctccagggcatgagtcctgaaatccccaaggcctgagttctagaatttcttccactggggccctgaccacacaggtgattctagaattctcctaggtgagttccagacccaggggtccaggagaaatagaatgttggctgggcgtggtggctcacacctgtaatcccagcactttgggagaccgaggagggcagatcacttgaggtcaggatttcaagaccagcctgaccaacatgatgaaacccggtctctactaaaaatacaaaaatgagccgggcgtggtggcgcgaacctgtaatcccagctactctcaggaggctgagacaggagaatcgcttaaacccaggaggcagaggctacagtgagctgggatcgtgccactgcactccagcctgggcaacagagtgagactctgtctcaaaaaaaaaaaaaaaaaaaaagagttccaaccacacatataatttaacatttttctggtcctcacacttaagaatgtaaatttaagtatactggggaaattaattttaacattattttaagtaatgttaattttttttttccttgagacagagtctcgctctgtcgcccaggctggagtgcagcggtgcaatctcggctcactgcaacctccacctcctgggttcaagcagttctcctgcctcagcctcccgagtagctgcctcagcttcccgagtagtaacattaaaatgtttaattttaacattactttatttaacccagggcatctggaatgatactattgcaatccataaacaacaggaaaaattattggtctattggtcgggtgcagtggctcacgcctggaatcccagccctttgggaggctgaggtgggaggatcacttgaggtcaggagtttgagaccagcctggccaacatactaagaccttgtctctacaaaaaaattaaaaaattagccaggcgtggtggcgtgaacctgcggtcccagctactcaggaggctgaggtgggaagatcgcttgagcccaggaatgtggggctccagcgagctgtgattgtgtcactgcattccagcctgggtgacagagcaagacttcaactcaaaaaaaaagttatcgaggtattttatgatcttttccccacccaccccccacccgcttacactaagtctgaaatttggacagaccacatttcaagcactggatgtcacacgtggccaggggctgctgtattgggcaggccgtgctaagacatctgagttccagagcaggggttcccgacccccgggccacagacgggttccgtgcctgggaggaacctggccactcagcaggagttgagcttagggcaagtgaccattctcacctgagctccacctcccgtcagatcagcgggcggctctgggtgcccctacgagcatgaaccccatggtgaactgaacataggagggatccaggttgcgtgctccttaggagaatctgactaatgtctaatgtctagtttcatcccagaaccatctccccactcaccccgtccctggaaaaattgtcttccatgaaatcggtccctggggccaagaaggttggaggctgctgttccagagaattcggaagcagatctccagtctcccaagttgggttctcgaaaacgtgagggcaggttctagaccttccaaactggttgcttgaaaatccaaggaggctgggcgcggtggctcacacctgtcatcccagcactttgggaagccgagacgggcggatctcccgaggtcaggagttcgagaccagcctggccaacgtggtgaaaccccatctctactaaaaatacaaaaatcagccaggtgtggtggtgcacacctgtaatcccagctactggggaggctgaggcaggagaatcacttcaatccgggaggcagaggctgcagtcagcagagatcgcaccactgtactccagcctgggcaacagagtgagaatctaactcttttgcccagactggagttcagtggtgcaatcacagctcactgcagccttcaactcccaggttcaagtgatcctcccaccttagcctcctaagtcgctggggctgggattacaggcgcataccaccatggttgattttttttttttttttttagtagagatgaggtctcactatgttgcccaggctggagtgctgtggtggactcatagctcactgcagcctcaatctctcaggctcaagggatcctcctgcttcagcctcccaggtagctggcagtataggcgtgcaccactacgcctggctgattttttatttttatttatttatttatttactttttgagacggagtcttgctttgtcacccaggctggagtgcagtggcgcaatcttggctcactgcaacctccacctcccgggttcaagcgattctcctgcctcagcctcccgagtacctgggattacaggcgcgtgccaccacaccggctaatttttgtatttttagtagagatgggatttctccatgttggccaggctggtcttgaactcctgacctcgggtcccaaagtgctgggatgacaggcatgaactaccatgcccggccttatttttatttttcgtagacaggaggtctcactatgtggcccatgctgggatttcaggctctttgagctttcttccatattggttagggctggagcaggactccactgtggcgggaggtatttgggcgcaaggagagcagttgtgaggactggtggtgacccccagttactgtctgttgtgctttggatgctgggcacgggaagcctggctgtaagtgtgtgtttccgggccgggcgcggcggctcacgcctataatcccagcactttgggaggctgaggtatgcggatcacgaggtgaggagatccagaccatcctggctaacgtggtgaaaccccgtctctactaaaaatatgaaaatattagccaggcgtggtggtgggcgcctgtagtcccagctactcgggaggctgagagaggagaatggtgtggacctgggaggcggagcttgcagtgagctgagatcgtgccactgcactccagccggggcaacagagtgagactccgtctcaaaaaaaaaaaaaaaaaaaagtgtgtgtttccaagaggctgttatggggcctcgggcacaccctcactgggtctggatcccagcctgtctaccaccaggcgtcccttctggtgaacagagctatgtgagaacttccaacagggacaccacggccgctcgtagcccagagcttgcagagctttgttcaaaggcaatggcccagggccgagcacggcggctcacacctgtaatcccagcacttgcagaggccaaggtgggtggatcacctgagatcaggagttcgagaccagtctggccaacatggcaaaaccctatctctactaaacctacaaaaattagctgggtgtggtggcacatgcttgtagtctcagctactcgggaggctgaggcaggagaatcgcttgaacccaggaggcagaggttgcggtgagctgagatcgcgccattgcactccagcctggtgacagagtgagactccatctcaaacaaacaaacaaacaaaaaagcagtggccatcatgatcggttgtgtcatctagtgggaggcaggggtgtgtctgcatgcgtgtctggggtgcattgtggggggattgcaggcgtattgagggcttaccaagtgcctggctcatctgagccctcaggaaaccacattgttggcagctacctcaccgtctcacaaccacccgctgaggttggaatgatcattaacagcatttaacagatggggaaactgaggcctagagaggcaaagtcactggcctaaggtcacatagctaaggagcacagtcaggatttaaatccaagcctgggagatcccaggacccacagtgggcaccacataaaggggctgtttggggtatggcagggactgccctggaacgttccggatcctgcctttgggcctacagggctttggtgccggtgagcaggccgcaggttcagctggctcaaggagcagcttcagggctgcagccaggctgggggctgggcaggtctcaaacccctggacctggggaatcagggaggtgtgagctgcatctgaggtcgggtgtctctgtgactctgtctctgtctctctacctctgattctccccaggctgccttgtctcagtccctgtctattcccaccccacctcgctctctctcccggccttgcgagtctcctcccagccccccatcccacccagtgggctgcccggaggtggcggcaacggggcagctgaatgggcctcttgttcctggccacacccgccccttggggtcaccctgggacatgcccaggcagcgtggctaccttaaagggccagtgctcagaaagaatgtgagcgggggaggctgcgtccactcccaaatcccacaccctccccaaggtggaccactcatgtgtctgacgggggtggggagctgtgtacctacacaccctcgtggcttgggggaggcctgtctggagcaggagatgtgatagggtttgggtttgaccttggataaatcccttcatctctctgtgcctcagtttccccatctagatcagggggctccttggtgccacccctgtgggttgctgggcagatggcatattatccaggattttgcacacagttgacactcttccggcgcccactgtgcattgatagagcacctgctgtttcagcccagcattcatccgccgtgcagacttggcaattccttcttcaccttgctccgtgcctcagtttccccaaatgcagaatgaggcgatggctgtcttagcttcacagagagctacgcaaggattgagtcggttcgtggaattagagggtattagggagaagggcctgaaacactgccaagtgtcacctccactggcgcacttattgagcgccagctgcataccaggccttgctgaggaagcctcactgcagaggttgcagtgagctgagaggcaaaggccacccagcctggatctcactctggtgtcatcgcctcctccctctgctcagggttgtgcagcttcaggctgctcccctgccctctctgggcctcagtttcaccttcagagcaacgggaacagccccatcctttcacacactggaaaccatcaccttcttctgcctgggagggggttgtgctgtctctgggaatcccaggcatcccccaggcaggagtcaacccagaggccctcggacccgggctgtaccctgtgacagctccgggtggctacgacgctcccgtgctccaggccagccccacagacagcccgggacaggttgctgccggatggacaagcctgtgcctcgctgccttatgtaaccagtttatgcaagggcagccggcccgcttacataaggggaggccgggccagcgcccagctggggagggggaggctcttaaagggaccggcgtcccccgcggctccctccacgggcactggtgcgaattcataggcgagctgcggactccgccctcagcaaggccgccattaatgtcgttatgattatttttgtggatgttgtttatcatcactatattctttccccagggcgggggttcagctgagcggaggaccacgcccagtgcttgggcagaggcttgggctgtgacgctggctctgggtgtcacctggttaagtccctgtctctgagcctcagcctccccttctgcacagtggggcaatgcaggaagacgtgaggtcctggagggtcctggccctgctgcctgttcactgtgtggcctcaggcaggtggcatcccctctctgggcctcagtttccccatctataaaatagcgcctgctctgtggggttgctgagggagagtcaataagacatattaagagtttacatgcccgccaggcatggtggctcacacctgtaatcccagcgctttgagaggctgagacgggaggatcacttgaggccaggagttcaagaccagcctgggcaacatagtgagatgcccatctctacaaaaaataaaacttagccaggcatggtgatgtgtgcctgtagccccagccactcgagaggtcgcggcaggaggattgctcaagtctgggaggttgaggctgcagtgagctgtgattgggccactgcactccagcctgggtgacagagcaacaccctgtctcaaaaaataaaaataggccaggcatggtggctcatgcctataatcccagcactttgggaagccgaggaagacagatcacttgagatcaagagttccagaccagcctggccaacaaggggaaaccccgtctctactaaaaatacaaaaattagctgggcgtgtggtgggagcctgtaatcccagctactggggaggctgaggcagaagaatcacttgaacctgggaggcggagattgtagtgagccgagatcgtgccactgcactctagcctgggtgacagagcaagactccatctcaaaaaataaataagtaaataaaaataaaaataggctgggcacagtgactcacacctctaatcccagccctttgggaggctgaggcgggaggatcgcttgagcccaggagtttgagaccagcctgggcaacatagcaaatctctgtctcaaaaatttttgaaaacaaaagagtttaggacagcacggagcacagacactgtcagcactcatccagtggaaccactttgcagccaataaatatttagtaagctcctactgtatgccaggcactgctccaggcgctgggatactgcagtgaacaggacagataaaaattcggccctggccaggcacggtggctcacacctgtaatcccagcactttgggaggctgaggtgggcggatcatgaggtcaggagatcgagaccatcctggctaacatggtgaaaccccgtctctactaaaaatacaaaaaaaattagccaggcgtgatggcaggtgcctgttgtcccagatcctcaggaggctgaggcaggagaatggtgtgaacctgggaggcggagcttgcagtgagccgagatcacgccactgcactccagcctgggtgacagagtgagactctgtctcagaaaaaaaaaaattctgccctcgtggaactcacagtttggttcaggcgatgggcaaagaacaagaaataaatgtcagtttaggcttagtgcggtggctcacgcctgtcatcccagcactgtggggggccgaggcgggcagatcacctgaggtcaggagttcaagaccagcctggccaacatggtgaaaccccgttcctactaaaaatacaaaacattagccaggcatagcggtatgcgcctgtaatccagccactggcaggggctgaggcaggagaatcgcttgaacccggaaggcggaggttgcagtgagccgagattgtaccactacactccagctggggccacagagcgagactccgtctcaaaaaataataataataaaaataaaaagaaataaatgtcagtttagcgataaggactatcaagaaaaataaagaaggccaaaggaaaagaggctgatgggctgtgctggggaggtccctgaaaggctgtctgaggacctgacatttgagctgagacctgagaagtgaggaggaaccagttatatgaagaactgggggaaggcgttccaggcagagggcacagcccgtgcaaaggccctgcggcaggacacacctggcactttggaggaacagtgaggaggcctgtgtggctgcagcagagtgaggagaggaagagaaggaggaggggagggcagtttgtgcaaggcctggtgggcagtaggaaggacttgggctttgaccccaaggcaggtgggagccatagagggctatgggcagaggagggaccagccctgactcaggtgctcacaggcaccctctgcctgctgcagggaggacagactgtggggggtgagggcaggagctggggaccagggcagagtggaccgccctggtgcaagcaggcggtagcagggacagaggcagaggagggggcagaatccaggtcaactccgacggtgtgaggattcagttgctcacctgggtcgtttataccttatctgaggctggcccttgctctccttgccccgtctcctgcctgcaagccgcacctgcctgggcacatgcagggaagggagcggcgcagcactgggcacgcctgggagctctcctgcaatcaggactttgttagcgggcaagctgggatatgggtcctggtgcccgggaggcccgtggggctctgggctcctgccagggtcccagccctaacccaggtacgccacccacatggcagggttattctctttttttttctctttttttagacagagtctcgctctgtcacccaggctggagtgcagtggtgcgatctcagctcactacaacctctgcctcacaggtttaagagattctcctgcctcagcctcctgagtagctgggactacaagtgtgcaccacctcacccagctaatttttgtgtttttagtagagacggagttgcaccatgttggccaggctggtctcaaactcctgaactcaattgatccaaccgcctcgacctcccaaagttctaggattacaggtgtgaaccaccgtacccagcctattctcatttattttctttcttatttttttttcttttttttgagacgaagtctcactctgtcacccaggctgaagtgcagtggcacgatctcagctgactgcaacctccgcctccagggttcaagcaattctcctgcctcagcctcccaagtagctgggactacaggcatgtgccactatagccagctaatttttgtatttttagtagagatggggctttgtcatgttgacgaccaggcaagtctcgaatgcctgacctcaggtgatccacccagcctcagcctcccacagtgctgggattacaggctggagccactgcgcccagacggtccttccttttcatgcctcctccttccactcccccatgtaccatgtctccttgtctctctttttctctctgctcatccctccctctcaactttctttctacaaatatttattgagcacctagtctgtatcaggccttattctagccactgagggcacaacagagatctagacagacaaagcctctgccctcaaggaggtgacattccactggggagatgagcaaacacccgtgcagtcactaagcaactaagcaaatccataggcaatcactaacttcctctgaaggaaagaaaacagaaggctgagattgagggtagccagaggctgcttgaggtgaaggggctcagcgtagacctctctgagaagggagcatttgagctgagaccaggagagatctcaagagagagcaagcagttagctgtttagacagagggaacagaatgtgcaaaggccctgaggcaggactgggccaggtgcattggaggaacagcgaggaggcccctgtggctggagcagagtgagtgagggggagagagggaagaggggagggcagaaagcggacaggacaggttgtgcagggcctgtggtcctagtcctccactttgactactcccccaaatctcttaatgttcctcacattcctttccctgacaagcatttattttgcacctgctgtataccagatcctatcaggagaatcccaaatattcatgcaacaagttcatattgggtgcctactgtgtgccaggctctgctggaataatcacactcatttggctgcaggcatttattgagtgccagctgtgtaaaagcatttatcgagcaccacctgtgtagcaggctctggggagagaggccacatgaaagcttgggaaggagaaagtttccttctaccccctttcaggtttgtgccctctggtttccagccccctcccacattcaaggcaacatttaaacctctgggttcaagttccgttgtccaactgcgtggccgtgagatctgcggcaagccccttcctctctcggatcttccgtttccccctttgtaaagcagaacactccacaatctgatgtgtttacaacttgacatctactttttgcagcaagggaaactgaggcacagagcagggcggagatgtgtctacctctccctccccaagcaagactggcatggagtctattctcctgaccccacgccaaagccagggcgtttggtattttgttttttcttggaggcccagagaggggcagggcttgcctgaagccacacagcaccgggcaggcctcggaattgcggagagccctcccctgggcgcctgcccgggctcccgcgccttcctcctgcctcctttggctgggccgccagccttgcctcccgtcctccggactccccgcgggctgcccagttggagacgcgccccaagaaatatcagaaggaaggggaagccgggaggggcctccgcctcctcccgccaccccccgccgcgcccggctgcccccacccggtgcccgacattggcagagagtgtcctcgggcgcttccgactggccctgcctgcttcgtgtggccactgatcccttccggagcctctccatggggacgcccgtgtgtgcgctcagccagtggcacatgtggctcccggggctcccttctccacccccccagcccctggcctgcccctttccccccatcccttcccgaacctctccatggggacgcgtgcgtgtgcgttcagcccgtgggcacatgtggctcccagggctccccccgaggcctgcccttctcccccccccgtcacagccgccgagtcaggcctgccaggaaggtgttgggggtgggggtgtggggaggcctcagcttggctgctgggaagccaagaatttgctccaaatgtaaacagcgagttattttcagtccactcccccccaccccgggtggcgttgacacatttgacattggcgggaccgggagggggtgggggtgagggtgtgcgtgcgggtatttttaaccttgctcctcacatccctggagtggctggtgccgagtggcagataatggggagggggcgcggaggcgtggggagccctgggtggccgtgcgcgggtgggcgcttggcaaggccgccctgctgttggcaccacgtgtttaacccctcagaggctgcagaggggctgggggaggcggcccagggcccagtggtgccccagaggctcccttgtcaccttctcctggtgtccccccacccccaccccacccaggagggcagggccgggtgcccgaggccggtgccagcctgcgccgcccagacctacaaaatggccgccaaggccggagaaacatctggaacaggggaagggagaggcgagaaaatggccgccagagggatgatgtcatgggcggcgtggcctcccagagcgtccccagcacggggcgagtccctacgcgcaggcctccgagcaggggccctgcggcctccagggacctccagacccgctgcccaggccggacacccacaaagagtgacaccggggtccccaggggtccccagaggcgggcccgagacctgggggagggcgaggccagcactgggcctccagtcccaacagcccgatgctggggacggttccggggcggtggtggccgctgacctgacccgcaggacaccgaggcgtccaccagcgcccgggagggcccggagccaggccatggagccggcgggggccgggtggaaagaaaaaagaaacttttctttgaaagtgattccgaagcaggttggctccggcccaggcggcccggcggcaggggagagggagatggaaagtatgggccagacttaaggaacgcaggaaggacgaggccggggaggcccgggatggaggccagcgtcctggaggtcaccccgtccacgcctctgcctctcgggcccccccaggtcacatccagattttcctccctgtccctggggcgggcggggagtgcggagaacatctatgggcttgtgttttttcctcttttgatttgtccagacaggcgatggacaagggctgggcaggggttttaggtcatctgcactgtcaggatgtggaggctcagagagggagagtgcttttagtgaggtcacacagcactggcaaaactgacagctgcttccctccttagagcatcttggggaggaggaagttctctatggaggatcagggtccgtactggaattcctttctatttttatttaatttaatttatttatttatttatttatttttgagatggagtttcactcttgttgcctaggctggagtgcaatggcacgatctcggctcactgcaacctccacctcctgagttcaagcgattctcctgtctcagcctcttgagtaactgggattacaggtgcctgccactacacccagctaatttttttgtatttttagtagagacaggggtctcaccatgttggccaggctggtctcgaactcctgacctcaggtgatctgcctgccttggcctcccaaagtgctgggattatacgtgtgagccaccgcgcccggcccctttttctttttctttcttcctttctttttttgaaacagagtcctcctgctctgtcacccaggctggagtgcagtgacttgatcatggcttactgtagcctcaaccttctgggctcaagcaatcctctcacttcagcctcctgagtagctgggaccacaggcatgtaccaccatgcccagctaaatttgggttttgtttgtttgtttgagacagagtctcactctgttgcccaggctggagtgcaatggcacgattttggctcactgcaacctccacctcccaggttcaagcgattctcctgcctcagccttccaagtagctgggattacaggcacccgccacgatgccctgctaattttttgtgtttttagtagagatggggttttgccatgttgcccaggctggtctcgaacttctgacctcaagtgatccgcctgccttggcctcccatagtgctgggattacaggcatgagccaccgtgccctgcctatttttttttttttgtagaaatagggtctcactatgttgctcaagctggtctcgaacttctgacctcaagtgatcctcttgccttggcttcccaaagtgttgggattacagcgtgagccactgtgtccagccaatgtctgtgtgtttttcactgctctgtccccagtacctaggacagggcatggtacacagtaggcgctcaagacgtgtgttggataaaagcatcacagttttctcctgaggctggggttggcacagatgctggcacaggaagggggcagaggctcaggaaatgcaaagtaggttgcaacgtaactggacacacacgggaaccctgtggtcacatttttcaggagggatgtgaggaggcgaaaactcaaacttccctcacttcaagtgcagattctgtgccgggagctgtggacgataaaccacatttgaacagaagcctgaataaagcgagagagtgagccaggcaggcatttgcagggacggtgttccaagcagtgtgcacagcccgtgcaaaggccctgaggcaggaccgtgcctggtgcattggtggaacagccaggaggcctgtgtggctggagcagagtgagcgagggggagagagggacgaggggaggaggggagggagggggcagaggcgggctgtgcagggccttgagcgccatggggagatggggagaacttggacttttagatatttggttttctgttttttgttttttgtttttgaggtggagtctcgctctgtcgcccaggctggagtgcagtggtgcgatctcggctcactgcaagctctgcctcccgggttcacgccattctcctgcctcagcctcccgagtagctgggactacaggcgcccgccaccacgcccggctatagttttgtatttttagtagagacggggtttcactgtgttagccaggatggtctcgatctcctgacctcgtgatccacccgcctcggcctcccaaagtgctgggattacaggcgtgagccaccgcgcccggcccaattgtttggttttgtttttgctttgttgttgttgtttttgagatggagtctcgctctgtcacccaggctggagtcactggtgcaatcttggttcaccgtgccctctgcctcccgggttcgagcaattctcctgcctcagcctcctgagcatctgggattacaggcatgcaccaccacgcctggctaatttttgtgtttttagcagagacgaggtttccgccatgttggtcaggctgagctggaactcctgaccttgtgatctgctcgccttggcctcccaaagtgctgggattacagacgtgagccaccgcgcccgggtgaactttcacatatttgtagacccagacacagtccagggtgctggggactagaacaaacgtttgcagaaagggctggggagggtgttccagagaaggagatgtcagagctgggctgcaaagtatggctggaggtttcctaggagggagaggggcagggaagacggcacagcaggagctcagaggactcaggcccaggtcactcgtatattccattgccttccaggacagagaaagttgaaccttcgccgggtaatgtttaaaaatggccggtgacacccagtagctgggaattccagggcctggctttggttctctctttagctggctgaggttgggaggcggacgtggcagccggcagagccagcaacatttggaagccggctaacgttggaaaatcaaccaggcgagctcacggtggcggccgatgctggaaacctgggctccgtgaggtccagcagatgccctgctggggcccaagtggacattctaggccttctgacagcccgccgggtttttaaataagtgtgattatggtttcagcaagtcctgtccttcctacagccaaaagatcaattcaatatggccactccgtgcaatgctgggccacccctgctgggccagggtgttgtgttgaagccaagattcccaacacctgagagtccagaagtttctttaaaaattgctttaactgtggtgagacacacatcacacactttttttttcttgagacagggtttcactctgtcacccaggctggagtgcagtggcactgtcatagctcatcgcagcctcaaactcccaggctcaagcaatcctcgcacctcagcctcctgagcatctgggaccacacatgcagcacgcaccaccacacccagctaatttttattttattttattttatttttgagacggagtctcactctgtcgcgccaactcggctcactacaacctccgcctcctgggttcaagcagttctcctgcctcagcctcccgagtagctgggactataggcgaccgccaccacacctggctaatttttgtatttttagtagagacaaggtttcaccatgttgaccaggttggtctcgaactcctgaccttgtgatcccaaagtgctgggattataggcgtgagccaccgcccctggctgacacccggctaatttttaaaaatattttgtagagatggggtcttgctatgtggtccaggctggtctcgaactccttgcctcaagtgatcctcccacttcagcctcccaaagtgctggaattacaggtgtgagccactgtgcccggcccagagacttttgaaagtctaaaatggattgtatcatagctcacatcactcctcttcccactgcaggataaaacccaggcctctcactgcaacacacaaggccccgaatggtcccgctcccctctccgttcgttcctctttctcttgcccaccacgctgcagcctggggtctgtctctgcctttcacacatccaacttcattcctgccccgtggaccttgcccttgtcaccgaacctttgtggaacgctttcaccccagctctccacatggctgggctccttctcccgctggagagccaccgtcacatcctcagagaggttctgcctgagtcctccctccaacgccgcccccaaagccattctgccttccgccagtttcattgcctccgtagaacctagaaccgtgtgaaatgatctgaggcttcctccatgcactggttctgcccgtctccctccccacttccttctctgccatccccccaaggcctggcgagtagtaggtggtcagtaaacacctgttccgtgagtgccgggtgtgcgttgacctcccagtcaccaacggcggaagcttcagccagcggacgcagggagttgtcccttgcaaagggggtgggtgctcccgggcgggaagggtggggccagagcccacggcgatgcctttgtcatgagctaggatggactgaatttgggctcacagccacggacaggagagaacagtgtgtccgccccgtcagtgccatccagcgtgcgtggctgttgtgcatcatttgtttgcttgagcaaaggctacagggtccagtgacattcttggcagtccatgacacctcacagacctgggaagtcaagagacctggctcccggccagatgagggtatcatttgaaatacaatttgctggccggctgcggtggctcgcacctgtgtttcccctactttgggagacagaggtgggaggattgcttgagcccaggagtttgagtccagcctgggcaacatagcgagactgcgtctctactttttttttttcctgagacggagtctcgctcctttgcacaggctggagtgcagtggttcgatctcggctcactgcaagctccgcctcccgggttcacgccattctcctgcctcagcctcccgagtagctgggactacaggcgcctgccaccacgcccggctttttttttgtatttttaatagagacggggttttaccgtgttagctaggagaacaacaatttgctttccagaaccagagcctctcaacactagcatgtgtgtggtcatccatgctaaatggtgctgaaagaggcatttgtgtctctctgagaaggagctatttgaggaaagtcctgaatgaggggagagaatgagccatgtagatagctgagggaacagtgttccaggcagaggcgcagcccgtgcaaaggccctgaggcaggaccatgcctggtgtgttggaggaacagcgaggaggcccccgtggctagagcagagtgaggaaggggagacaggaaggaggggagggcagggaggggactgatcgggccatgcagggccttgtgggccacgggaagaaggtgggcttttccccgcaaagaaggtgggagctatggagggctgcgggcagaggaggggtaatgttcatttaactcctggagtttgacaaaatgctatcatcaaaacagactttatcacagaacctctagctatccccgtcccctccgtaagctcctctgagcatagcaacagaacgggaaggtaaggcagcgattggaaacgcccgcgttatagatgagcggagagccgctggaggttggaggctccgacagaggaggtgactggtccagagccacatggccaggttgtgctggggctggaactccatcgaacgcaggtttcagggtgcagcccttgtttccataagataccccaaaatcagacaagcctgggacttgccacctcttctttaaaaaccccagtgctgtttttgttgttttttttgagatagggtctccctctgttgcccaggctggagtgcagtggctcaatcatagctcacccactgcagccttgacctcctgggctcaagcagtcctcctgcctcagcctcttgagtagctgatactacaggtgtgcatcaccacagccaggtaacttttttttttaaagtagagatggggtggggtatcctgtattgcccaggcttgtctcaaactcctgagctcaagtaatcctccctccttgaccttccaaagtgcaggaattataggtgtgagccaccatgcccagccctccagtgctttttttttttttttttgagacggagtcttgctctgttgcccaggctagagtgcagtggcacgatctcggttcactgcaacctctgtctcccgggttcaagcaattctccttcctcagcctaccgagtagctgggactacaggcacacaccaccatgcccggctaatttttgtatttttagtagagaccaggtttcaccgtgtcggtcaggctggtctcgaactcctgacctccagtgatctgccctccttggcctctggggattacaggtgtgagccaccactcccggccctccagtgcattttaaaggctctgaaaagtcctacgttgtcctgaaaactcctcagtgatgctgaacctttttgacctgtgaaccccaggtttgggtaaagtctgctcacatccggcggcacacccataggaaacccccagcccggctgtgaggagtgtgaactttgattcaccaggtccttggcccagctttagtttctcccgtgtccgtgtttgcttgtgcaatcatgaatatatattgaccagcaccaggtgccacattgaacagtttgtccgcgccgtcagtgccatccggcatgcacggctgttgtacatcatgtctttgcactggactgagctcagctgcagaaagcagcacatttcagagggtgtctaccgggccaggagaaaacacacaaaccgccaacattttaaagcctgtaatcgacatcgtatacaattggaaaagatgttcatttatatgttttgtttttgttttcttaagacagggtctcagtctgtcacccaggctggaatgcagtggtgcgatcatagctcactgcagcctggagctcctgggctcagacgatccacccacctcagcccccagagtagctgggactgcaggcacaggccaccacgctgggctaatttttagatttttgtagagatggggtcttgctctgttgcccaggctggagtgcagtggtgtgatcttagctcactgcagactcaaactcctggattcaagccatccccacctcagcctcccaagtagctgcgactacaggatgtgccaccatgcccagctaatttatttttatttttatttttgctagagagagtgtctccttatgttgaccaggctggtcttgaactcctgacctcaagcaatcctcctgccaaggcaatcctctcaaaatgcagggattacaggtgtgagccactgtgcccagcctgttcatacgttttaaagagaggtgcagacaaaactgggttggtgcatccacatccctctctgtgtgatgctgggtaatttgcttaccctctctgggtatcctggagattgtcagccccagccaaggatggttaaaaggcattaaacaatacctaggacagagcctgacatctggagctcattaaaccatccgtacatgcagatgtcgttataattattatcaatgctattctgtcactccacaccctgactcccacctcagtggccccaggtgggggtgctctgaaatttctctggcctggctgagcgggaggggccggggttctgctggaataaagaacagaggaggaagccttgaaggatttgttctgtcccagctgtccccagtatcacagttagccacacggatggcagaagggacctttgacagtggacacaggggctggaagggcccagcctggggctcactgcaatctccgccttccagattcaaatgatcctcctacctcagccttccgagtagctgggattacaggtgtgtgccaccacacccggctaatttttgtatttttagtagagatggggtttcaccgtgttagccaggctggtcttgaactcccgacctcaggtgatctactcacctcagcctcctaaagtgctggaattacaggcatgagtcaccgtgcctggccttggggctttatctgactggctagagaatgggattcaaacaccaggaatcatcccaaaccgccaatgagaaggagccctggagtgaggggaaccgagacccctcctaaaaggatttacagggtgtcacagaatcaaaattacagcaaaggctcaactgtgagatgccagggtggctgatcattgattctagacccatcactaccagctggtgttctgtgagtttgaagccattgctgtctagctttgtgcctcagtttccccagctggcgattaccgtcccccatatggggacggtaatcacgtgtctgctgcagaggagttacaaagatttgtgaggcaatggaggcaacatttgcagccgaacctagtcaaaggaattactcactgcgcattaatttgttgttttttgagatggagtctcgctctgtctcccaggctggagtacaatggcgcgatcttggctcactgcagccatcccccgggttcaagcaattctcccgtctcagcctccggagcagctgggattacaggcacgcaccaccacgccaggctagtttttgtatttttagtagagacagggtttcgctatgttggccaggctggtctcaaactccaggcctcaggtgatcctcccacctcagcctcccaacctccctagcatttcaacgacctgaagtgaccctcttgatttattttctgacttgttcatttcctgtcacgttcccattagaacatcagtgcctcgagaggagggattcttgtctgtctctgttgccgctgtgtcccttgggcgtctggcatccgggtggctctctgcaatctgtttgctgagtgatcaaaggaaagaactaatggcaacatagtgcagctccaatgtacagatgaagaaatccaggctcagagatgtggaagtacttgcccagggccacacagccggaagcccgccaactcttttagtaaagggccagtgacactgtaaacattttaggcttttaggcaggtcacatgcagtctctgttgcctattttttcttttgtttacgaccctttaaaaatggaaaagacaggccgggcgcggtggctcacgattgtaatcccagcactttgggagtccgaggcggacggatcacgaggtcaagagttcgagaccagcctgaccaacatggcaaaaccctgtctctactaaaaatacaaaaattagctgggcgtggtggcacgtgcctgtagtcccagctactctggaggctgaggcaggagaatcacttgaacccgggaggtggaggttgcagtgagccgagatcacgtcaccgcactccagtctgggagacggggcgagactgcatctaaaataaaataaaataaaataaaataaaataaaataaaataaaataaaataaaataaggaaaagaccatacttagctgactgtgcaagaataggcaaccccttctagtttgctcatctaatgtcagaacccacgaactgattccaaaaccctccacagagaatctaaaatgctgcaaaccccgactctgtgatgctggggatctaaagtgcttagtttgtttttttgtttttttgttttttgtttttttgtttttgtgttttttgagacagaggctcgctctgtggcccaggctggagtgcaatggcatgatctcggctcactgtaacctctgcctcctgggttcaagcgattctcctgcctcaacctcccaagtagctgggattacaggtgcctgccgccacacccggctaatttttgtatttttggtagagacggggtttctccatgttggccaggctggtctggaaatgctgatctcatgtgatccaaccgcctcaggctcccaaagtgctaggattacaggtgtgagccaccgtgccctgccaagtgcttggttctttagtctggagtgcagtggtacgatctcggctcactgcagcctccacctgccaggttcaaacaattctcctgcctcagcctcctgagtagctaggactatgggtgcatgccagcacacccagctaattttttttttttggtacttttagtagagatggggtttcaccatattgtccaggctggtcccaaacccctgacctcaagtaatcctcctgcctcggcctcccagagtgctaggattacaggtgtgagctctactgcgcccggccaagtgcttggttctttctcgactcaatcctattttgttctacacaggtcaggtctgcctccactcccccaaccccatgccccatttcacccattggcctctgaagcccagagatgggcaggggtttgtctgagaccacacagcaagaggggcagcagaggaggatgggaacccagatctgcttccctcccaggctacacccctgtagccccccaacccctgcaaacttgttatttaagcctcctcattacaggggtttggagccgaggaagccctgctgccttttcgtaaatgctctccctagacagcaatctttgatggaggctctgggagaagttgttcagtgatgtgcatttgtcgagcacctactgtatacctggtgccagtatagggttgggtggaagggtcttgtccactcaacacccctttttctgccctattattgccttccctggccaggcgaggtgactgacacctgtaatcccagcactttggatggctgaggcaggaggagcgcttcagccctggagtttgagttcagcctggccaacatagtgagacctcatctctacaaaaaaatgtttgttaaaaattagccagatgtagggccacaagcctgtagccccggctacttgggaaaagaaggcaagagaatcacttgagcccaggaggtcgagcctgcagtgagctatgatgacaccactgtcctccatcccgggccacagagtgaggccctgtctcaaaaaaaaaaaaaaaatcaagaccatgattgcccccccataaagagcccttttaaacattttttccctaatcactctcctgtgaaattttaatagcataggtatattttatatacctatatatattaaaaatgtacctgtgccatcaaatatatataatatatattatacataggtatataaagtataactatatgtcatatagataggtatataaaatgtacctatatggcctgtaggtatataaaatatgccatataggtatataaaatatacttacgccattaaatatatatttaatatacaaatatatttgtttttttctatactgtaacaacatatgtctgtacattattattattattattattatttttgagacagagtttcactcttgttgcccaggctagaatgcaatggcgtgatctcggctcactgcaacctccgcctcccgggttcaagaagcaattttcctgcgtcagcctcctgagtagctgggattacaggcatgtgccaccgtgcccggctaattttgtatttttagtagagacggggtttctccatgttggtcaggctgctctcgaactcctgacctcaggtgatccaccgcctcggcctcccaaagcactgggattacaggcgtgagccaccgtgcccatcctacatttttttaaaaacacaaaattctggccagacatggtggctcacgcctgtaatcccagtgctttttttttttttttgagatggagtctcgctccgtcgcccaggctggagtgcagtggcgcgatctcggctcactgcaagctccgcctgccgggttcacgccattctcctgcctcagcctccggagcagctgggactacaggcgcccgccaccaggcccagctaattttttttgtatttttagtagagatggggtttcaccatgttagccaggatggtctcgatctcctgacctcgtgatccgcccgccttggcctcccaaagtgctgggattacaggcgtgtgccaccacgcctggcctaatcccagtgcttttggaggcctaggcaggagggtcacttgagcccaggagttagagaccggcctgggcaatatagtgagacccccatctcaaagcagaacaacagcagaacttctgagctagacagacaactttgctttgaatctgacaccagctttgggaaatacgctgtgcgcactgggccttggttgaccaaccttacaaattgagcagatttaatcagatggggtcaggaagtgctaattcagcacagtaaaaactcagcagatggaagctgcccactggggtctggggaatcttggggctgtggaagttagccagccttcgacattatgcactttgtacacatctgctcagaccgaaagaaggtccattttaaggctgggtgtgtactaagtaggtggaggaggaggaattatctgtgcctctttttcttttctttttttttttttttttttgagatggagtctcgctctgtcgcccaggctggagtgcagtggcgcaatctcggctcactgcaacctctgcctcccgggttcacgccattctcctgcctcagcctcccgagtagctgggactacaggcgcccgtcaccacgcccggctaatttttttttttttttgtatttttttttagtagagatggggtttcaccatgttagccaggatggtctcgatctcctgacctcatgatccgcccgcctcggcctgtcagagtgctgggattacaggcgtgatccaccgtgcccggccacctctggaagcagccagggccacacagtgcactagaatattcctcgctgatggcagaatattctgtgctgtccaacttggtcaccaccagccacgtgtggctctttggtgcttgaaatgtgatttgttcaactgagcaacttaaaatttaattttcttttctttttttttttttttttgagacatagtctcgctctgtcacccaagctggagtgcggtgactccatcataactcactgcaacctccacctcccaggcttaagcagtcctcccacctcagctccccgagtagctggaactacaggcatgccactacacccagctaacttttgtattttttgtagagacggggtctcgccatggtgcccagtctggtctggaactcctgggctcaagtgatcctcctgccttggctttccaaagtaccgagattacaggcatgtgccaccacgccccgcctaattttatttcagcgtagctaacttaaatgtaaaaagtcatatgtggctgtgacccttgtactgatggctgtagaacgtgaggagttttcaggagccaaatgatggaagaatggtcagcaggtggttgagaactattcccaggttttagagatgatttaaaatgagacggctggccgggcgtggtggctcacacctgtaatcccagcactttgggaggccgaggcaggaggatcacttgacgtcaggaattcaagaccggcctggctaacatggcaaaatcctgtctctactaaaaatgcaaaaattagccaggtgtggtggcaggagcctgtagtcccagctactcaggaggctgaggcagaagatttggttgaaaccaagagacggaagttgcagtgagccgagattgtgccactgcactccagcctgggcaacacggcaagattccatctaaataaataaatacataaatacataagatgaggcagccaaataaaaaggaaggagattctgaccaggctactcacatgggtgaaccttaaggacattaagctcaattgagaaaagccggacacagaaggacaaatactgcaagtccactcctaggaggtccctagagtcgtcagattcatagagacagaaagtaggttggcggggtcagggggtgtcggaggctggggaggggacggggagtgagtgtttcatggggacagagtttcagtttgggaagagtagaaagttctggagaggatggtggcgatggctgcatggccattggaatgtatttaatgtccctaaagctgtgcatggaaagttggttcaaatggtaaatattatgcatattttaccacaataagaaattaaattaaaaattaaaatgagatggcatagatttatagcatattatttttaaaactaaactaattttggccaggcatggtggtgctcacccatggttccaattactcgacagtctgaggtggggggattgctggagcccaggaggtccaggctgcagtgagccatgattgtgccactgcactgcagcctgggtgacagagcaagaccctgtctcaaaaacaaaattaggccgagcacagtggctcacacctgtaatcccagcactttgggaggctgaggcacgcggatcacttgaggtcagaagtttgagaccagcctggccaacttggtgaaaccccatctctactaaaaatacaaaaattagctgggctaattaaaattagattagaaaattagattacaggtggcacacacctgtaatctcagctacttaggaggctcaggcaggagaatcacttgaacccgggaggcagaggctgcagtgagctgagatcgcaccattgcactccagcctgggcgacacagcgatactctgttccaaaaaaaaaaaaaaatttaatttaattaaaaaacacataaattcctaggactataggaaaagaagaaaacttccttaacccaagaaagggaactacaaaaccccacagctaaccccgtacttagtggtgagaggctggatgttttctcccgagatcaggaacaagacaaggacaccactttccccatttctattgaacattgtactggaagttctgccagaccaataaggcaagaaaagaggctggacgtggtagctcacacctgtaatcccagcactttgagagaccaaagagagtggatcgcttgagcccaggagttccagaccagctagggcagcatcgcgaaaacccgtatctacaaataatacaaaaattagccagatgtggtggcgtgtacctggggccccagctacttgggaagctcagataggaggatggcttgagctcaggagttcaagactgcagtgagccgtgattgtgccaccttactccagcctaggtgacagagcaagatcctgtctcaaaaacgaagaagagaaagagatcagcctggctatcatggtgaaaccctatctctactaaaaatacaacaaaaattagctgggcgtgtgggcgtggtggcacgtgcctgtaatcccagctacttgggaggctgggaattgcttgagcccgggaggcggagattgcaatgagctggatcgtgccaccgcactccagtcctggcaacaagagaacaagagcgagattccatctcaaaaaaataaataaataaataaataaataaataaaagatacaaaataacaccatcaaagacagtaccaatagcgatattaatcaaatagcaatagtagtgaagctgccctctgcctggtgaagcactcactatggcagccatggttctgggagttttattaataattcattcatcacctttttttttttgagatggagtcactctgtcgcccagactagagtgcaattggcccgatctgggctcactgcaaaatccgcctcccgagttcaagagattctcctgcctcagcctcccaagtagctgggattacaggtgcccaccaccacgcccagctaatttttgtatttttagtggagacggggtttcaccatgtggggcagaatggtcttgaactcctgaccttaggtgatccacccacgttggcctcccatagtgctgggaatacaggcgtgagccaccgcgcccagccaatgtttcattcattaccatcttgtccctcataaacagcttccaagagggggtgctatagttgtgtccatttcacagatgagaagagtgaggcgcggatgcatccgaggccccgctccctggctgcccgattcgcaagctcatgctgggagccaccgtggggcctgacacttagtaggtgcccaagaaacattctcccttcccagggaaacacccggatgccagctgggcactgcggcctgctgagacgccagctgggcactgcagcctgctgagtctgtgtgggctctggttccggaagagggtcctgtgcccacggcctggcgcccggacggccggctgcccaggctgggtccttcccaacgtcatggccaccggtgcccagccttgagacagtccaaagggaactggccagctccgaggggccgctggcagccccagcctgggatcggctgcagggcttggggccgagctgggcacactcccctcggctgctgtccagcccagatggccacggccggggcagcctagctggaggaagggcttctctcgtctgctcctctgtttcctgacgaggaaactgaggcaccgggccctgctcctgtgctgttcatggcatccttggtcttggcaatcagtgggtgctggacacacggtgtgtgcatagccattagcacggcgccaggctaactccagaggctccgtgcgctaggaaatatcattgctttgatcattctcacagcaaccctgagaatggtctccatttatttttttaaaacaaggtcttgctctgtcactcaggctggagtgcagtggcatgatcacagctcactgcacccttgacctcccaggctcaagtgatcctcctgagtagctgggactacaggtgcctgctaccatgcctggctaatttttttttcttttttgttgagatggagttttgctcttgttgcccaggctggagtgcaataatggcgcgatcttggctcaccgcaacctccgcctccggggttcgagcgattctcctgcctcagcctcccgagtagctgggattacaggcatgcaccaccatgcccggctaattttgtatttttggtagagatggggtttcaccatgttgatcaggctggtctcaaactcctgagctcaaagtgatctgcccgcctcggcctcccaaagtgctgggattacaggagtgagccactgcacctggactgtttttttgtattttttgtaaaaacggggtctcactatgttgccctggctggtctcgaactcctggcctcaagcgatcctcccgcttcggcctcccaaagtgctgagattacaggcgtgagccactgtgccactgcccctggcttaatcatcatctcattttgcggatgaagaaactcaggccttgaaaggaaagtgaggccgggcgcggtggctcacgcctgtaatcccagcactttgggaggccgaggcgggcggatcaccaggtcaggagatcgagaccatcctggctaacacggtgaaaccccgtctctattaaaaattcaaaaaattagccgggcgtggtggcgggtgcctgtagtcccagctactcaggagactgaggcaggagaatggcgtgaacccaggagacggagcttgcagtgagccgagatcatgccactgcactccagcctgggcgacagagcgagactctgtctcaaaaaaaaaaggaaagtgaccttctcaggagcacaaagacccggggggtcttggagacagtacttggctcaggtgtctgatcccagcacaaaactgtagataaaataaccctggtgaaaaagcccatcacagggcctgggagggagaacattgctcgtggttctgacccgcagctttccttgtttatgaaatggatacagccaggcatggtggctcacgcttggcatcccagcactttgggaggccgaggcgggcggatcacctgaggtcaggagttcgagaccagcctgaccaacatggtgaaactcccgtctctactaaaaatacaaaaattagccaggcgtgatgacgcgcgcctgtaatctcagctactctggaggctgaagcgggagaatcacttgaacccgagaggtggaggttacagcaagccgcgatcgcaccactgcattccagcctgggagacagagtgagaccctgtctcaaaaaaataaaaataaataaataaaatagaagaaagtaataatggggcggactctcgtgattgaggtctccaaatgccctcaagtgcttcaggagtatcctctcctcactgcctcccagctctgctaaggcctgggcagtgtttgtgcccacgtggaagatgagaaacaggctcaggacagttaggcgacttgcctgaggtcacacagcgatcgcgtcctggccttggggtctggcgggtgggcaggaggggcgtgattctcttcctgcggctttcgacgttggttgctgccaccttcgtctttgacctgggtgatccatgggtggggctggggaggggcgtctgcctggctgggcttgtccacctgccccccaacttcagccctccgtggaggggtcagggctccagagggggcggatgtgactcgtcctgcatccaggctgccagagccgataacgctgagctcagcgtctgtctgcctgcgcgtctgccaaggaacctaattatttttagataagatggaggggcgggcgccggggcagagggagcacccaagctgggcgggcagtggggtcgtcgccatcagagagaccacccctcagcctcctctctctggggtccctgaacggcaacccaggactaacagccgggtccctgggactacaggggcagaggctgaggctaagggacgtgacgtctccaggactcacctctctggtcctcagtttccccatctgtaaaacggacatagtgatagacctcctgcatagggctaaggcggggctgaatgactgaacctcattttattttatttattttgttttatttattttattttatttattttgagacggagccttgctcttgtcgcccagactggagtgcagaggcatgatctccacttgctgcaacctctgcctcccgggttcaagcgattctcctgactcagcctcctgagtagctgggattccaggagcgtgccaccatgcccggctaatttttatatttttagtagagacggggttttgccatgttagccaggctggtcttcaactcctgacctcaagtgattttcctgccttggcctcccaaagtgctgggattacaggtgtgagccaccgtgcctggccgttttgttttatttttttgttgttgcttaatttcattttctgagatggggacttgctatgttgctcaggctggcctccaactccagtcgcccagactggactgcagtggtgcaatcctggctcactgcaacctccgcctccgaggctaaagcgattctcctgtctcagtctcccaagtagctgggattacaggtacgcatcaccacacctggctagtttttgtacttttagtagagatggggtttcaccatgttggccagtctggtctcaaactcctgaccctgacctcaggtgatctgcctcccttggcctcccaaagtgctaggattacaggcgtgagccaccgtgcccggcctgaacttcattttacagatgaggctcagagaaggcaagcgacttgctcagggtcgcacagcaagaaagcggcacagctgggatttgaacatcagtctgttaagattccaggtgtctaagttcttacccacgactgagccgcccctgcagaagcggagggcttacccaacatacgggtacactggcgctcacagggcctagctggtgtctgcagggtgcctggccagatgtctgtgaccctctagggcagcagccaagggaagggcccaaagagagaccccagggcctgggtgtgttttggggccactgtttgtctccatagcactggcccagcccaggactggggccaccagcatcgacacttcatctgctcctggggtggggtctctgtgatgccaccagtgtttcttccctctctttgcagatgcagagcaaagcggcagtccccggacagggatgggctctgaccaggaggacagcaagcccatcacgctgggtgagtctgggggcagcgtggcggtgaagggcggagggcgcagccctgtcctcgtcttttatttgggaatcatttgcttggcaccactcgttttacagatgagcagactgaggctcggagaggttaaggggcctgtccaggggctaccagggagctgggttggaacccacgactctgagctcccagcttctgggctctgaggtgctcaccccatgggagaccccagagggttctacggtcccatgggacgtttgagggtttttgtttgttttgttttgttttcattcatttatttattttgagatggagtctcgctctgtcatccaggctggagtgcagtggcacaatctcagctcactgcaagctccgcttcccgggttcaagtgattctcctgcctcagtctcccaagtagctgggattacaggtacctgccaccacacccggctaatttttgtatttttagtagagacggggtttcaccatgttggccaggtcggtcttgaactcctgacctcaggtgatccgcctacctcggcctcccaaagtgctgggattacaggcatgagccaccgtgcccggcctgtttgtttgtcttagaaacggtctcacgctgctgcccaggctggagtgcagtgacaccatcctagctcactgcagcctggaccagctaggctcaagcgatcctcctgccttagcctctcaagtagctgggactacaggtgtgcaccaccatgcctggcttttttttttttttttttttttttttttttttttgagatggagtatcactctgtcgcccaggctagagtgcagtggcgcgatctcggctcactgcatcctccatctcctgggttcaagcaactctcctgcctcagcctcctgagtagctgggattacaggtgtgtgccaccacggctggctaatttttgtatttttagtagagatggggtttcaccatgttggccaggctggtctcaaactcctgacctcgtgatccacccacctcggcctcccgaagtactgggattacaggcatgagccaccgcgcctggcttttttttttaattttttaaatatttttgtagagacagagtctcactatgttgctcagactggtctcaaactcctgagctcaagtgatcctcctgtcttggcttcccaaagcgctgggatcataggtgtgagccaccacacccagccctcatggggcgtctaatagatgggtaggacagtgtaattctatgttgtagggataggaagtgggaaaattaacctcacttagaccagagcagtcacttccatcctagcccccagctcctgcccttggcccccaccatttgtccttctcactatggccagaggacacctgtgagcccccaagtcagggcccgtccctcctctgcgcacagccatccacggctcccacctctcttggggtaaaagcccaggtcctccctgtggcccacaaggccctgcacaacctgtcccatccctgccctgtcctcccctcctccctctctccccgtcgtccactcccagccacacagacctcctcgccgttcctccagtgcaccagacccagtcctgcctcagggccgctgcacattctgttacctctgtctaaacagccaactaactgctcgcttgttctctccagatctcccctggtctcagctcaaatgcccccttctcagagaggtctaccctaaaccccttcagcataagcagcctctggctaccctcaatctttttttttttttttttttgagacagagtcaggctctgtcgcccaggctagagtgcaatggcgcaatctcggctcactgccatccccgcctcctaggttcacgccattctcctgcctcagcctcccgagtagctgggactacaggcgcccaccaccacacccgggtaattttttgtacttttagtagagatggggtttcaccgtggtagccaggatggtctcgatctcctgaccctgtgatgcacccgcctcggcctcccaaagtgctgggattacaggcatgagccaccgcgcccagcctggctaccctcagtctcagccctctgttttctttccttcagaggaagttagtgattgcctatggatttgcttagttgtttagtgactgcacgggtgtctgctcatctccccagtggaatgtcacctcctccagggcagaggctttgtctgtctacatctctgttgtgccctcagggcttagaatggggcctgatgcagagtgggtgctcaataaatacttgtagaaagaaaagaaggagagagggagggatgaagcagagagaagaagacaagagaggatatatggggagaggaaggaggagagatgaaaaagaaggaaggggccaagtgcggtggctcacgcctgtaatcccagcactttgggaggccaaggcaggtggatcacctgaggtcaggagttcgagaccagcctgaccaacatggtgaaaccgtctctactaaaaatacaaaaattagtcgggcatgttggcacacacctataatcccagctagtcgggaggctgaggcaggagaatcgcttgaacccaggaggcagaggttgtggtgagccgagattgtgcaccctgggcgacacagcgagactctgtcaaaaaaaaaaaaaaaaaagaagaagaagaaagaaggaaagaaagaaagaaaagaaagagagagagaaaaagaagggccgggtgcgggggcttacgcctgtaatcccagcactttgggggactgaggtgggtggatcacctgaggtcaggagtttgagactagcctgatcaacatggagaaaccctgtctctactgaatatacaaaaattagccaggcgtggaggcacatgcctgtaatcccagctacccgagaggctgaggcaggagaattgcttgaacccgggagacagaggttgcagtgagctgagatcgcgccattgcactctagcctgggcaacaagagtaaaaactccgtctcaaaaaaaaaaaaaagaaaagaaaagaaaaagaaggaaggggccagggcgcagtggcttacacctgtaatcccagtactttgggaggccgagtcaggtggatgacctgaggtcaggagttcaagaccagcctggccaacatggcgaaaccccatctgtactaggaggacacgggaggctgacgcaggagaattgcttgaacccaggaggaggcggaggttgcagtgagccgagatcacgccactgcactccagcctgggggatagagtgagactgtctcaaaaaaaaaaaaggaaaggaaaagaaggaaggaagagaaagcgagtgggtgaggcgtccttcttggaaggaccggaacaggcatgcacagggaggctggaaggttctcggaggttcacaggcctgaggccactcctcactggcccccggtgactcctccgtctgtgacccgggtcctccgcggcctcctgtgatccccagacgcctctctccaagccagatgttggagggaggtgggggcagcggcgcttggcctggtcccctggggagcttgggcgtctggtagaggaaatcacgtcctcccagctcgccagggagtcccccagagatggagctgagcaggcgctgcacaaacaggaaaccccggtcgggggaggcggagggggcgtgctgacaccagctggccagctgggtcagcaggaaacggctctggccacttctcctggacactcgggggccaccgctctgtcctcttcagaatgcgtggccctgaacctcccagcgcggggcagggttggttcattgccttcactcagcaaatgactgtaacagggggccgggtgcggtggctcacgcctgcaatcccagcactttgggaggctgaagcgggaggatcgcttgagcccaggagttcaagaccagcctgggtaatatagcaagaccctatctctacccaaaaaaaaaatatacacacacacacacacacacacacacacacacacacactagccccaggagttcaagaccagcctgggtaatatagcaagaccctatctctaccccaaaaaaaaaaaaaaaaatatatacacacacacacacacacacacacacacacacacacacacactagccaaacacggaggtgcatgcctgtaatcccagctacttgggaggctgaggtgggaggatcgcctgagcccaggagtttgagaccagcctgggtaacatagcaagaccctatctctacaaaaagtaataataataatacaaaaattagccaagggtggtgatgcgtgcctgtagtcccagctacttgggaggctgaggcaggagcatcacttcagcccaggagttcgaggctgcagtgagctatgattgcaccgctgcactcgagcctgggcaacagagcaaaattctgtctctaaaaaagaaagattgtaacagggggactggcgggggtttgggtctgcagaactggacacagccctgagctccctgcagtccgtgctgccccctgggggccgggagaggaactgctcccaccgccacccaaaagccaagagcctgtcccacctccaaacctaccaggctccctggctctttccactccaaccctgctggcctgcaacttgccaagtgcatttctacccggaggcctttgcacgggctgttcccagtgccgggaacatcgtggccctcagggaggtgatgaaacatcatccccatcggagaagccaacagtcacggggcggttgccaggcgctgttctcggagctttgcagattttaacaagttccttcctcttatccagtctcatcttgaggtctgtaaaatgccaccatctcggtcaggctttctctgagccctgggtgtaaaatagcctccctccccaccctagctagttccccaccagccgcctgccttaccacaggctgatgcacctcgcatttgacttaatgagcttttaatttgtagtaaaatgtgcatgatgtacaatgcatcattttagccatttttaagtgtccaagtcaaagtgcactaagtacattcacctctatctaattccagaacctttctttttttttttttttacccccaggctggagtgcagtggcgcaatctcggctcactgcaacctccaccttcctggttcaagcaattctcatggctcagcctcccaagtagctgggatcataggcacatgccaccacacccggctaattttttgtattttcagtagagatggagtttcaccatgttggccaggctggtctcgaactcttgaccttaagtgattctcttgcctcagccttccaaagtgctgggattacagatgtgagccgccgagcctggcctaattccagaacatttcatcccccctaaaagaaaccccatccccatcagccaccactccctgtctcctctcccagccctggtgcccacgcatccccttcttgtctctgtggcttggcctgtcctggacatttcagtgaaatggctcatgcctgtaatcccagcactttgggaggccaaggtgggtggatcatgtggtcaggagttcgagaccagccggaccaagatggtgaaaccccgtctctattaaaaatccaaaatttagacaggcactgtggcaggtacttgtaatcccagctacttgggaggctgagacaggagaatcgcttgaacctgggaggcataggttgcagtgagccaagattgcgccactgcactccagcctgggcgacagagtgagactccgtctcaaaaaaaaaaaaaaagaaaagaaaaagaaagaaagaaatggcatcacacactgtgtggccttttgtctctggtgtccctcactgaatgatgtcctcaaggtgcatccatgttgtagcctgtgtcagagcctcgttcttttatttttatttatttactggttttgagatgaagtctcactctgatgcccaggctggagtgcaatgtcgcgatctcggcctgtagctgggactacaggtgcccgccaccatgcccggctaatttttgtatttttagtagagatggggtttcaccatgttggccaggctggtcttgaacccctgagctcaggtgatccacctgcctcagcctcccaaagtgctgggattacaggtgtgagctaccactactgcgcccagcccaaggcctcattctttttcttttccttcttcttttttttttttttttttttttttttgagacagggtcttgctctgtccccgaggctggagtgcagtggtgcaatcatagctcactgcagcctcaacctccagggctcgagctatcctcccgcctcggcctcccaagtagctgggactacaggtgtgcaccaccacgcccagctaatttttgtactttttgtagggatggggtttcgccatgttgcccagtcccgtctcaaactctggggctcaagtgatccacctgcctcagcttcccaaagtgctgggactataggcacaagccaccatacccagctaattttcgtattttttgtagacacagggtttcgccatgttgcccgggctgatctcaaactcctgagctcacgagatccacccacctcagcttcccaaagtgccgggattacaggcatgagccaccacgcccggcatccttttcacggctgagtcctattccagtgtgtggctagaccacgctgtgtttatctcttcatcttttgaagggacatttgggtggctttccagtttgagctgtggtgaacagtgctgctaggaacattcgtggacttttgctgacctattaatcttggctgctgtctgtcgctcacactggactttgagtctcacaggggcaactgcttcagcctgtatcatctcctgctgtgccggggcccagctcagaatcagacactgtggatgcttagtaaacgcctgttgagtccatgaatccctcctacaagggcgtccgagggcaggacagggctgtccccaagctgtctgaggttggccaaggctcccgacctctcggggacaacttcgatttccaaatctgtgaaatgggtccaaaccactccagtcgagaggacagtctcccttcctttaatattaggtaggagcaatgctggggacactgagggttttaactgcggcttgtgggcctcccattcaaccccccattttaactgacccattgctgggtgccaagctctggtctaggcacgaaggacactgcagggtcggggcagacagacatccctgcccacacggacctcccagtctgaaggggagaagaacaagaagccagagtatctcgaagggtgacagtgtgtaaagcaagccagctgcccctcccaggcagttggatacagatctcacgacaaccccgatgatgggattgatggtttcacttttgcaattagggaaacttggaggctgagagagggaaagtgacctgccccagatcacacaccgaggcaggtgatggagccgatgtgagcccaggcctccgctttccgctcttttttttttttttttttgagatggagtcttgctctgttgcccaggctggatggagtgcagtggcgcaatctcggctcactgcaagctccacctctcgggttcacaccattctcctgcctcagcctcccaggtagctgggactacaggcgcctgccaccacgcccggctaatttttgtatttttaggagacagggtttcactgtgttagccaggatggtctccatctcctgacctgtgatcctcccgcctcggcctcccaaagtgctgggattacagacgtgagccaccgcacccggctccactcgttttttaagagagggtgtcgccctgtttcccaggctggagtgcagtggcacaacaatggttcattgcggcctccacctcccaggctcaagtgatcctccagcctcagcctcctgagtagctgggactacaggcacggaccacaacacctggctaattttaacactttttgtagagatggggtctcgctgtgttccccaggctggtcttgaagtcctgagctcaagcgttcctcctgcctcggcctcccacagtgctgggattacaggcatgagccactgcgcccggcctgctgttcacttgaatgcagcattccacagcatgggggaacccggatgaaggctgtgtgaaggcccacactggacaaggaccccccacggggccttccccatcagactggagctgtcattcccccacagcacaggatggacagggggaacgtccaggctcgggccagcccccaggagtccaggcagccctggagtgtggggaagggaaacaggcccagctcagcctactgaccccgctgtcttcctgttccagacacgaccgacttccaggagagctttgtcacctccggcgtgttcagcgtcactgagctcatccaagtgtcccggagtgagtgttcccgtcagccctgagctgggtcttggagaggggagggggccgcagggaggaaggagcccacccccctcaccctactccttgtcctttccagacaaccccctgtgtcactaagccaaggttcctagaaagggaggtggccaggcccttcccagagcccaaggtcagggctccctcccacctctccaggaaacagaatctaaatgctggatggcaactaaggaaacttctgccccagcatccctcctcctccctggggcctccactgtcctgtcccaggagaccccaaaggaccccgcccctcctgtccccttgctttctctgctgacctgctggggacccagcacattccgtcacacactgtctgaatcccaccccagcgagtcctgggcgctgtccttctttagccctgactgacaccttccctgtccagatcagcagagcctggcctccagctttggctacacctctgcctcacagtgtgctcttggcctctccccatggccttggtcctctgatccatagaataaaactggtttcagccaccctaggaaccgggccaatatgggaagggggtccccctttggactgcacccagtggctttccctacctctctaaagcaaaccgcagcactgggcactgcttcctgcctcactctcctctgtcaccctctgcagcacccgtggtgactggaacaggacccaacttctccctgggggagctgcaggggcacctggcatacgacctgaacccagccagcactggcctcagaagaacgctgcccagcacctcctccagtgggtaagtacccaggtccccacctctgggcatttcatgaccccattcatcaacccatcccctctggcccgagctgactcattcctctccctggaatacctcttttcacgattcacctggcctgagaaactcctactcatctcatccttcaaaacccagccagccccacgtgcctcttcccctagccctgacagcccaccgtgggctcccccagcctcaagtcctgccggctcagccagcccttaggaccctccccacccagaagaatgcagacacaggttgttgctgagatatgctttgtgacctcgagcaggtcacactgtgtgtgccccagtttccccatccataaaatgggatcatacccctaacaggcagttctgaggactacaggtggccaggagattagccaggctgcctgggttttggtctccaccatgctagcttggtgtccgacctgtgttgagaccctccctgcctctggcccgggtgtcccatccaagcaatggacaggttggaacaggcgttcgtagggaacgggctgaacgcccgcggctcccgcgatgtctcgcgatactacctccctcgcccccgctcacttaaggaccggaagtagcaaagcccgccgtcgcgccccccgccccgcgtctccctggtaaccagcctctccccttccctcgcccataaggagcaagcggcacaaatcgggctcgatggaggaagacgtggacacgagccctggcggcgattactacacttcgcccagctcgcccacgagtagcagccgcaactggacggaggacatggaaggaggtagggctggtggcgggggcggagccggccttccggtctgagtcaccgtggcgggaactacgtcttccggcagccactgcgcgggcgccgcggggcaggaagccggcctggagccgcggggcctcctgggaattgtagtcgtcccgagctgcgcttggctggaagtacggtccgggttcgcgttctcggatctctttggttccgctgcggcgaaggagggcagagactgtcccctgcctgactctcctgccctccggccgtgaatgccacatctctgtggggtccccgagctgcaggatggactcagtagtgactctgatcaacagggcgcctcttcctgggatctgtcatagaatccctcgtctgtagggaccctgtttgtcctcttcccctctagaaggtcctgagatgccggatcccttctcattggggtccttcttgaggttacttttttttttaaccaggttcccatctccatgggatcttctggttctgcaggagactcgtctcctttctgtagggtctccattcccatggcgtcgttttctaggaagattttatcctcttgcttttctgtcttcagaagggtcctctctggggtgtctttctttctttctttctttctttcttttttttgagatggagtttcgctcttgttgcccaggctggagtgcaatggcgcgatctccgctcactgcagcctccacctccctggttcaagcaattgtcctacctcagcctcccaagtaactgggattacaggcatgcaccaccatgcccggctaattttttctatttttagtacagacggggtttcaccatgttggtcaggctggtctcaaactcccgacctcaggtgattcgcccgcctcggcctcccaaagttctgggattacaggcgtgagccaccacgcccggcctctgtttttgtttgtttgtttgtttgtttgtttttgaaacggagtctcggtctgctgcccaggctggagtgccggggtgcaatcttggctcactgcagcctcgacctcccaggttcaagtgatcctcctgcctcagcctcccaagtatcggactgcaggtgcatactgccatgcgccgttaattttttttttttttttttttttttttttggtagagatggggtctcactatgttgcctaagctggtcttgaactcctgagttcaagtgtgatctttcctcctgcctcgtcctcccaaagtgctgggattccaggtgtgagccaccatgccgggcccctcttatttttttttaatttttgttttttgagatggagtcttgctctgtcacccaggctggagtgcagtggcgagatcttggctcactgcaacccttcctcctgagttcaagcaattctcctgcctcagcctcccaagtagctgggattacaggcacccaccaccacacccggctaatctttatatttttagtagagacagtgtttcaccatgttggccagtctggtctcaaactcctgacctcaggtgatccacccacctcggcctcccaaagtgctgggatgacaggtgtgagccactgctcccggccacctgtaggatttttagaagcagtataacattaggattaagaggtcagattcaggcattggagagacctgggttcagatcccagccctgcccgtgtctagctctgtgtgctgtgtaacctggggcacatcacttaacttctctaagcctcagtttcttcatctccacaatgggggtgatgtgaataatgttctttgggagctacaggaggaggaagggtaggatgtgcgtgaagcaaccgtctggcccatgcgacatacccgggaaacgggaggtcactgtcatccacgtctttataacattcctgtctctgaccaggctcggtggctcacgcctgtaatcccagcactttgggaggccgaggcaggcggatcacgaggtcaggagatcgagaccatcccggctaacacagtgaaaccccgtctctactaaaaatacaaaaaaaatagccgggcgtggcggcgggtgcctgtagtcccagctactcaggaggctgaggcaggagaatggcatgaacccgggaggcggagcttgcagtgagctgagatggcgccactgcactccagcctgggtgacagagcgagactccgtctcaaaaaaaaaaaaaaattcctgtctctttccggcactcggacgcatctagttgtgacatttcaggtgccaaggcccctcccttccacagtgtgggctcccagagcaggaacattcctaaagggtctccatccctcaggggacctgtctcagtatttatgaggttctttttttgtttgtttgttgtttttgttttgagatggagtcttgcttgttttgagagatcacgccagtgcacgccagcctgggcaacagaacgagactatgtctcaaaaaaaaaaaaagaaaaaaaaagtcacttctgtttcgttttttttgttttttgttttttgttttttttttgagacggagtttcgctcttatcacccaggctggagtgcagtggtgcaatctcggctccacctcctgggttcaagtgattctcctgcctcagcctcccgagtagctgggactacaggcgggcaccaccacaaccagctaatttttgtatttttagtagagacggtttttactatgttggccaggctggtcttgaactcctgacctcaagtgatccgccaacctcaagtgatccgcccatctcagcctcccaaagtgctggcattacaggtgtgagccaccgcacccagccgtgacttctcattaactctgtaattgatgaggctgtcagaatgtaaactgcacgctaattaaagtgaaagaccacctttgcgatgagccaaagcaaccctgagaggaaaaattgtagctttaagtctatttattaggagaggagaaaggtggaaaataaagaatctagctttcaacagagaaaactcaaaaagaaaacattttaagctctggagctcagtctgacttttctgcccggctgctcactggcaaccccttccactggggaaggaggtggtagcaatggggggaggacaaagaggaagcccccaccagcttctgctctgtgattgggaatcgcagagctagcagggaatgtcagaggaggtctgtgctcctgcagcttccacttgattacctcaggggatggcaaactcactccctcctgagggtttcttttttttttttttttttttctttttgagacagagtctcgctctgtcgcccaggctggagtgcagtggcgccatctcagctcactgcaagctccgcttcccgggttcacgccattctcctgcctcagcctcccgagtagctgggactacaggcacccactaccacgcccggctaattttttctattttcagtagagacggggtttcaccgtgttagccaggatggtctcgatctcctgacctcgtgatccgcccatctcggcctcccaaagtgctgggattacaggcgtgagccaccgcacccggcctcctcctgagggtttcatcctcagtgtaaagccctcctgtgtgctggccctacctgaggccctggggacacagagatgatccaacccactcttgtccctaccttccaggggctaacagcctagtgagggagatgggtttttatccaggtgactacagcccagaggaggaggcacagaagacagtcagggggaacaagaggaccctgatagaacttggaagaaaagggaggacctccccgaggaggagaatcaggctgacagagcagtgaggagctcgggcaactggcttctctgcttctccagctgtgtgacatttggcaggttccttaacctctctgcccctcaatttcctctgctatacgatcaggttgctggccgggtgcagtggcttacaactgtaatcctagcaatatggcaagaccccatctctacttaaaaaaaaaaaaaaaatagcatcacatagtggtgtacacctgtagtcccagctccttgggaggctgaggtgagaggattgcttaagacgggaggtcaaagctgccctgagctatgatcataccactgcactccatccggggcaacagagaaagaccctgtctcaaaaaaaaaaaaaaaaaaaaaaaaaaaaaaaaaaaaaaaaaaggctcacctgtaatcccagcactttgggaggccgaggcaggcggatcacctgaggtcaggagttcgagaccagcctggccaacagggtgaaaccccatcattactaaaaacacaaaattagccgggtgtggtggtgggcacctgtaatcccagctactcgggaggctgaggcaggagaatcacttgaacctgggaggcggagggtgcagtgagccgagattgtgccattacactccagcctgggcaacaagagcgaaactccatctcaaaaaactctgccttgatatcccagtgaagagaaaacactggaagaatttttttttttttttttttgtcagagtcttgctctgtcgcccaggctggagtgcagtggtgtgatctcggctcactgcaagctccgcctcccgggttcatgccattctcctgcctcagcctcccgaatagctgggactacaggcacccaccaccatgcccggctaattttttgtatttttagtagagacggggtttcaccgtgttagccaggatggtctcgatctcctgacttcgtgatctgcccgcctcggcctcccaaagtgctgggattacaggcgtgagccaccgcgcccggccaaacactggaagaattttaacacccgtggcccagggctggactttacgtaaagcacgcacctggggcgtgagagccgggtttattattaattcgcggctaagctacaaccgggatgatttaagtggatttatccgcagggaagatgatgggagggcattcccagcagggagaatcgtggtttgaggagttgcactgtggatgtttggggccagaccatcctctggggcggggctgtcttgggcactgttgggtgctgtgcagagttcatggcctccacccactccgtgtcaggagcaccccccagtggtgacaaccgtaaatgtccccagacctggccaaatgtctcttgcgggcagaatctcccctataatatagccagaggcatatgcaaagcacctaaacggagtggggagaaggtgcgtgacccctggtctgggccactcttttttttttttttgagacggaatctctctctgtcgctcgcccaggctggggtgcaatgcgcgatcttgactcactgcaagctctgcctcccaggttcaagcgattctcgtgcctcagcctcccgaatagctaggattacaggtgcccgccaccacggctggctaatttttgtatttttagcggaggcgggttttcaccatgttggccagtctggtctggaactcctgacctcaggagttccaccacacccggctaattttgtgtttttagtaatgatggggtttcaccctgttggccaggctgctctcgaactcctgacctcaggtgatccgcccgcctcggcctcccaaagtgctgggattacaggcgtgagccactgcgcctggccttttttgttttgttttgttttgtttttcccaaatagtgacttgctctgtcgcccaggatggagtgcagtggtgcgatcagcgcccactgggctcatgccatcctccttcctcagcctcccaagtagctgggactatgggcacttgccaacacacctggctattttttgtactttttgtagagacagagttccctgtgttgcccaggctggtcttaaactcctgggctcatcctcctgcctctgcttcccacagtgttgggatggcaggtgtgagccaccacacccggctggccgctttttctctatgtcccttcccaacattttagtcccagacagccctgcggaggtgcctggcaggcacctcattttgcagagggaaaccctgaggctcaaagaggtgacatcacctgctccaggtcaccccagcggcaagcgggtgcacagggacacggaaccacgtggccgttcccagcggccccactcagggtacctcgctctctttgttttatggggcatctgtgatgtcctaagccgggttatttcccctcccggcaacactctgtgagatcagggctgcccctggccatcagttgacaagtggggaaactgaggcccaaaggtcccacagcaaagaaggggcagagccccgagcttatgcccagtgcttcctgggcctctccccatcgctgtggcctgcatcggtaaacatttcgcagcctctgaagtcccaagggggacgcctcagaacaggcctggcccctgggctggagcagggttcctgaggttcccagtggggcccagctgtaacctcattggtggaccgaggcaagggccagaggggcccaagggaagggccagaggggccgggggcacaggaagggccggaggggctgggggcacggggagggccaggcttattgttgcagcctgcaaggctgtcccaagccgggtgcctccgcagagggaggacacaaaacaggaacccaggcaggcagggtctctcccgaaggtgcccttggcccctggccaccaccctgggatgctcctcctcctcctcggcatcctccccccacccttccctgccctttccagcttcctgtctagacagcccccaattagccactcattaagggggttaagctgattagagcagctctcccttcctctggcggactcggggccttttctcccgggcagtgctcagccagtccccaaccctgaggctcacagaggcctggggggatcatgccagcccgatgccaggcaagacccccaccccacacctccaggccccacattccagcctctaggctttgcccgcttggggcctgggccaggccctttctcctggccgcctccacccgaggcctccctgcttacgcggctgcgtggggtggagggaaggtgccttggagcagcccccactgtgctttgtttttgctgcttgtgtagctcccccttgaaggcgacaaaggtcccgtccacaggcggttattacacagggcggggcaggcagcccccatccattcctctcctctgtcaccccaggcttcccatcccttttttttttttttttttgagtcagaatctcactctgttgcccaggctggagtgcagtggcatgatctcggctcactgcagcctctgccttccagattcaagcaattcttctgcttcagcctcgcaaatagctgggactgggactacaggcgcctgccaccatgaccagctaatttgtgtatttttagtagagatggagtttcaccatgttggccaggctggtctcaaactcctgacctcaagtgatccgcccgcctcggcctcccacagtgctaggatgacaggtgtgagccaccgagcccagcccgcccatccctttttttaaccccagggtggaggctagtgcaacgtggcctggggagggacagagttgggttccaactccacctccacccccccttggctctatggccttaggcgagtgacgtcccccatcaggcctcagcctccacatctgtgaaatgggcgcagctcctgtaagctctgcacggggcagctgtgaggaccacattaagagaggaggctagtgccttcacagaaggtcctcacccagggcgatgctgccccacccccagggacactggccggtgtctagggacatctgtggttgtcacaactgggagagctcttgacatggagtgggtcgaggccagggatgctgcttagcaccctgcagtgcccaggacagcccctccccagggaacgagccagccccaatgtctacagtgctgaggctgagaaacctgtattaattatgtagaaaaaaattgaggctgagtgtggtggctcacacctgtaatcccagcactttgggaggccaaggctggaggatcgcttgagcctagtagtttgataacatagggaaaccctgtctctacaaaaaaataccaaattagctgcatgtggtggcgtgtgcctgtagtcccagctactcgagaggctgaggttgggaggatcgcttgagcccaggaggtcaaggctgcagtaagctatgattgcaccagtgcactccagtctgggcaacagcgtgagaccctatctcaaaaaaaaaaaaagaaaaagaaaaaagtctgccccctgctcacaacggaataaactcctagtgtggcagacggtgtgtaaaccagggggacccccagctcctgggactcacctcctctctccctccccactcaaggtgtggatttcaatgtgtgcagcctcctgggacctctgcagggcagaggatcatgggacgcagaggatcatgggacgcagagtctcttgggggtccatggaatcctctaagacagaggattttacctatgggtgatcctgaccccagaggacactgggtgacatctggggacctgtgtggttgtcacgactgcagggtggtcctggcatggattgggtccagggacaccgcttagcaccctgcagtgctcaggatggccccaccctagagaatgatccggtcccaaatgtccacagggcccagaggagaccttggtgcactgtcaacgccccgtggtcactgctgtcctcatcagattcatgccctgcatcggggcctctgtccactccacacactctgtgtagggcccctcctgaccccggaccctagagacccagccagagtgggccttggccccctgggggagccggcatttcagtgggagatgggcttgtttgttgagcaaacaaatggctgctccgacggggtgatgagggccttttgtcaaatacaaagaggaggtcagatgggcgtgtgtgacaaatggctgctccgacggggtgatgagggccttttgtcaaatagaggaggtcagatgggcgtgtgtgacaaatggctgctccgtcggggtgatgagggccttttgtcaaatacagagaggaggtcagatgggcgtgtgtgttaaacagacaggaagaagctctgatgggggagccctcgggcctgcgtcctcctcacagtcaatattctcagatggggcattcaggatgccgggaggggcgtatggatgtgttccctgagaggaaagatggccactgagatgggcgggggacgcacatgcccgctggctgaacagggaggtcccacaggggtcccaggcatgcctgctgaacagacagaggatgcttggaggcggggtgcagagtcagtgtccgtagagcctgccgggagcgtgccggcttattctttctcgcggtgcctgagctgcgctcccccctccttcctgccctgccctggctgccgctggccccatctcaggaagctctagcggtgcctgcagggatgtggcggccgggggtggagtctgagccagactatttccatccaggacaagcggttctaggaaatcctcctaaatgagcgtctgacaaccctaacctcgttcccgccgtggccctgcgcttgcagggagctgccagcccctgcacacacacacacacgcttgcacacacgcatgcatgctcatacatatatgcacgcacgtgcacaggcgtgcacacatgtatgcatgcatgcttgcagacctgtacgtgtgcgtgcaagcacacatacatagacatgaacatgcatgtgcaggcatacacatacatgcatatattcacgtgcacacgcatgtgcgcattcacacacatagacacgtgcacaggcatacacatacacagatatgaacgtgcatgtacaggcatacatatgcaggcgtgcacacgtccacatatgctcacatgcgtacacacacatgcacagacatgcacacatgcatgcagctgtgcacatgcgtgcaggcatacacacatacatgcacgcacacacatgcatgtattcacatgcacacacacacgtgcacaggcatacacatgcacacacacgtgccgacaagaccagcctggcctccccggctccaggccaccctcattcctgccacatcctcctgccctggaaaagcccgggcctggctgctggggcccagcttggtcacagacttcatggcatcccactgggcagtggggcctctctgggtggctcagcctcgatgtccgaggcctcaggagtgttcccccttgagtgttcacaggctgggcatgagtggaggtgtcatccttcctgccccccatgtgggtgtcctgggtgcccgcctcctccagagccgggtgttcccgggtccctgggaactgctgacctgcttctggggtgtgtcccagtgacaccttcactcctcacagcatggtgtgtgcagggccatggggacagctggttccataaccacaaaagcagatgaagagctgcatgtccccccacagctgggtcctggatctgggctccccctgggctgcagccatcagagaggacggaagttccctgagtggtaaccccgttcagggaaggatgcagcgatgctgggaggatggaggaggtggggacaggactggggagggcctgtaccacacagatgcctgcaggtgcctatggaaccaccagcaggagacccaagacacggtgacatcctcaccgtttctcatcagggcatcacccggggacagcaggtcacatctggggacatccgtggttgtccccactgaggggcgctcttggcacggagtgggtggaggccaggggtgctgctcagcgccctgcagtgcccaggacagctccctacagagaccgatctggcccccacatcagcagtgctgagactgagaaatcctgcgtgaattatttggaaaatattgagttacgtcactgctcacaccagacaccagaagaagctcctgacagggcagacggtagaaaccagggggaccccagctcctgggattcacctcctctctccctcctcactccgtgtggatttcagtgtgtgcagcctcctgggaccacagcagggcagaggatcatgggacatagtctcgtggagggtccatgggatcccctaacccagagggtctcacccacacgtgattcttgcccagggtacttttggtgatgtctggggacatctgtggttgttacaaccgggggtgctcctggcatgaagtgggtggtggccagggactctgctcagcaccctgcagtgcccaggagggccccaccccagagaatgatccagccccagtgtccacagtgcctgtctgagagaccctggaggtaaggaactccaagggccaggtcgaagggaagctaaactcatcaccctgtttggatggtctcagtagatatgttttaccttaaaagaaatgtaaaaatcctttctaaaaattcggctccccagggcacgcctccctgagattccatttccagggatagggtagggcccaggacactgcatttctcaggcaagatgtgatccttagccctcacttgaaaaagcttctctggggccaggcactgtggctcacgcctgtaatcccagcactttgagagaccaaggcaagaggatcccttgagcccaggagtttgagaccagcctgggcaacatagcaagaccccatctctaaaaaaaaaattgcctggacatgatggtgcatgcctgtggtcccacctacctgggaggctgaggtgggaggatcacttaagcccaggaggttgaggctgcagtgagccatgatcgtgcctctgcactctagcctgggtgacaaataactcggctgggtgcagtggctcacgcctataatcccagcactttgggaggccgaggtgggtggatcacctgaggccaggagtttgagaccagcctggccaacatggtgaaaccccatctctactaaaaatacaaaaatgacccgggcgtggtggtgggcgcctgtaatcccagctactcgggaggctgaggcagtagaatcgcttgaacctgggaggcggaggttgcagcgagccgagatcacgccattgcactccagccagggcgacagagggagactctatctcaaaaaaaaaaaaaaaaaaaagacacagccccagaaggccaggcatttcggctccagagctgggactccaccccagcctcctggaaatacccaaaatggccctctttggggctctgtgttcccacttcattttgaagacagggtgaaagtgtcaaggggcaccgtgtcatctccccactcaccccaaatagcagcagcagcggctcctgcagtagctaacattcttccagctgggtggctgacgttccctcggaaagcagggctgaaggcatcctcagagaatgccccgatgcccagggatctgggacggccatgggcttcacctgcacaggcacccctggcccaatcctcacagctgccactcccacactgctcccgatggaaattccagagctttacagaatcccctgttttatgaaaaggggtagacgtggcagctcaccccaggtcgcacagcctcatggccagccggggtttgaaccctggaccacctgcttcccccacacccaggggctttccagggggtgcctggagggggagggaagccgatgtttggtgggtgagcctccctgagtccatccgttttttgtttgtttgtttacttgcttgtttgtttttgagacagtttcacagtttcattcttgttgcctgggctggagtgcaatggcgtgatctcggcccactgcaacctctgccgcctgggttcaagcgattctcctgcctcagcctcccaagtagctgggattacaggcgtgagcccctgcacccgactatccatctgttttttgtgtttgtgatggagtcttgctctgtagccctggctggagtgtagtggcgtgatctcagctcactgcaacctctgcctcctgggttcaagcgattctcctgcctcagcctcccaagtagctgggattacaggcacccgccaccacacccacctaatttttgtatttttagtggagacagggtttcaccatgttggccaggctggtcttgaactcctggcctcaagtgatctgcccacctcagcctcccaaagcactgggattacaggcatgagccactgtgcctggcctctgtttcttcattcattgattcactgaggaaggtgtgaggggctgagctgctgagttgggggctgtgggggcttttgtcccaggcagcctgggaggtagtgaggcccctgtctgcagagtgatgccagcaagtcactgcagaggggggatgcacctcatttcagccccagggaggctccgttccttcctcccgcgtggacgagggaaggcagagctgagctggggcttgtctgtgcgcccttagccagtcagggtctaactggacttcggatctgactgtctctgccctccctgccaccttctctagggctcgggtgactcccaggtgatggggcagccctgagccttcccatttctctggaaggagagtaggcaagggccaggagcgaggcccaggggcacgtgttgatacccagctctccatcccccggctgtgccgccctggctagccccttctctgctctgagccttcgtttactcctctgtgtaatgggctcacagcctctccccctcaggattctggggtaagaggaggcggggtgatgaggcttcctatcccttcggaggctggctttggggaaggtccagggctcatggggtgtgaccagcctgtgactctctcgtcccatcccctccacaggcatctcgtccccggtgaagaagacagagatggacaagtcaccattcaacagcccgtccccccaggactctccccgcctctccagcttcacccagcaccaccggcccgtcatcgccgtgcacagcggtaagcgccacgggcccctggcggggaggggcggcgggccctcctatcaggcctctcacagccggggaagtcccactggatgtctgaccatgagtcctattgctgtagccttctaggtgggcaaaaaaccatagaggtgccgtagtggagagcgcccagggccttgttccagcccggctgagaggttggactcagtccctttgggcctcagtttcccccctgtataacaaaaggctgcaacctaacttcacctcactcccctcacccccgtctcaatctaatccccccattccaaccccagacactgatggacaggcaggatcagaagctgccaatgaggccaggcacagtggctcacacctgtaatcccggcactttgggaggctgaggcgggtggatcatctgaggtcaggagtttgagaccagcctggccaacatggtgaaaccccatctctactaaaaatacaaaaattagccaggcgtggtggcacgcacctgtagtcccagctactggggaggctgaggcaggagaattgcttgaacccgggaggtagaagttgcagtgagcagagatcacaccactgcactccagcctgggcaacagagtaagattccatctcaaaaaaaaaaaaaaaagctaggcttggtggctcatgcctgtaattctagcactttgagaggccgaggcaggcagatcacaaggtcaggagttcaagaccagcctggccaacatggtgaaaccccttgtctactaaaaatacaaaaattagccgagtgtggtggtatgcgcctgtagtcccagctacttgggaggctgaggcaggagaatcgcttgaacccaggaggcagaggttgcggtgaggcgagttcacgccattgcactccaacctgggcgacagagcaagaccctgtctccaaaaaaaggctaagtgcaagtggctcacgcctgtaatcccagcactttgggatttcaaggcgggcggattacgaggtcaggagattgagaccatcctggctaacatggtgaaaccccgtctctactaaaaatacaaaaaattatccgggcgtggtggcaggcgcctgtagtcccagctacttgggaggctgaggcaggagaatggcgtgaacccgggaggcggagcttgcagtgagccaagatcgtgccagtgcactccagcctgggtgacagagcgagactccatctcaaaaaaaaaaaaagagacatctccatctcggccaggcacagtggttcacacctgtaatcccagcactttgggaggccgaggcaggcggatcacctgaggtcaggagttcaagaccagcctggacaacatggtgaaatctcgtttctactaaaatacaaaaattagctcggtgtggtgatgcatgcctgtgatcccagctactcaggaggctgaggcacaagaatttcttgaacccgggaggcggaggctgcagtgagccaagattgtgccattgcactccagcctgggcaacagagcaagactccatctcaaaaaaaaacaaaacagaacaaacaaaaaatcaccttccatggttgccattgggattaaggggggtgaattgtaggaagcctcaaatattgcttaccaccccatgttctagtgatcaactatttagttctttacacagtcatgcacacagagaggcagtcccaaatcaaagcagccatttgggccaggggtcagcaaacgctggccccctggttgcctgttcttacgaataaagttttattggcaaacagccacgaccacgtctttgtatatgtcctgtggcagctctcaccctgtcttggcagggctgagtaattacagcagagaccacgtggccaaaagccaaaaatatttactatctggccagaggctgtggagatgagggagtgactgctataaatagtgaaaatactaaaaatcactgaactgtttagaaagaggaaaaggcaggcaccacaatagaatatgactcagccatgaaaacgcacgaggctctgacgcaggccaccttgaggacgtcatgctcagtaagagaagccagacaaaaaggccacacagcatgtgatctcatttctatgaaatgtccaggacagggccagccacagaggcaggaaggggatgtatgggtgctggggctgggggaggaggtgaggagtgacggctgatggagacggaatttctttatgtgctggaattaggccgggcacagtggctcatgcctgcaatcccagcactttgggaggctgaggtgggtggattgcttgagtccaggagtttgagaccagcttgggcaacatgatgaaaccccatctctactaaaaatacaaaaaattaaccaggcgtggtggcacacgccggcagtccgtgctactcaggccgaggcaggaggatcacctgaggtcaggaggtcaaggctgtagtgagccatgatcatgcccctgcactccagcctgggtgacaaagcgagattctatctcttaaaaaaaaaaaaaaaagatcactattcagccatttgcagaaagagcttgccaaccctagatttatagtgtagactgtggggccagatgggctgggttcaaattcccggtctgccatctgatgccgtgtggccccaggcaggtgacacatcccctgaaggccaccctgtcatcctctgtttaaaaaaaaaaaaaaaaagacggggccaggtgcagtggctcacgcctgcaatcccagctctttgggaggccaaagtgggcggatcacctgaggtcaggagttcaagaccagcctggccaacatggcgaaaccccatctctactaaaaatacaaaagttagccaggcatggcggcgtgcacttgtaatcccagctactcgggaggctgaggcagaattgcttgaacccaggaggtggaggttgcagtgagctgaggtcataccactgcactccagcctgggtgactgtctcaaaaaaaaaaaaaaaaaaaaaagaccaggctcagtgggttacacctgtaatccccgcactttgggaggcctaggagggaggatcgcttgagcccaggagttcgagacctgcctgggcaacatagcaagacccccacctctacaaaactaaaaaattaaattaaaacacaaggataatatcacagccccagtggggttgccgtgggagtcggggaatttgggtgtcaatgtggtcagtgctgctgggtttttttggtggttattgttactaaacgcactgagatgccggcaggaatgacacccacagacacacagtcacacggtcacagagcagaccggctggagcccccaagtaacccccgcttcccactgtctccgcagggatcgcccggagcccacacccgtcctccgctctgcatttccctacgacgtccatcctaccccagacggcctccacctacttcccccacacggccatccgctacccacctcatctcaacccccaggacccgctcaaagatcttgtctcgctggcctgcgacccagccagccagcaacctggaccggtgagttgggcggggcgcattcgggcctctcctggcggctccaggtgacctcccgggggccacgtgctcacacgaaggcacaacctctgcttaaaagggtcttgaggacttggctctgaagtcccctcctctgtcgtgctgggaggcagctggattgggtcagaattgagatgctttcggatgtcagggtttcgggcgcatcatgtcgcaccctgtggggtctgggtagcacccgtaggtcccagcaactgcgtgagtcgtactcatgttaacacaaggcagggagggactgggcatagcggctcatgcctgtgatcccagcgctttcggaggccaaggcgggaggattgcataagcccagagttcaagaccaacctgggcagcatagcgtgacccagtttctacaaaaaaaatacttaaaaatgagccacgcatggtggcgggcgcctgtagtcccagctactcaggaggctgaggtgggaggatcgcttgaacctgggaggtcgaggctgctgtgagctgtgattgtgccactgcaccccagcctgggtgacagaacgagaccctgtctcaaaaagaaaaaaaaggttggggggcggggggcaggaagacattgattacaaaaaaaccaccaaactcagttcgagcaagacagcgtttgccagactccacaggaagctttggatgttcagagcttttcggactttggaaccacgggccaggccgtggatgatggtggatgatggcgtgctcgcagtgaattaggaaaaacgcggagaacctgctgttaggaggcggtggcactgtttggaaggaaatcagtcgagttggcgtgcagggggtttacagaggagatgcagtgagcgtggccccagtagtgccgggctttgagtgacaccagcaagcgggtgtccccaggcccctccacctccggccgtcctcagacccaccaaacccgccatggtcacacccgcgccctggccccccagcctgccaccccgtccgggccgtgcacagagccgggggcggccggcgccagcagcccgaggtagagggggagcccaccccttaaccacgtgtctctctgttcccccagttaaatggaagtggtcagctcaaaatgcccagccactgcctttctgctcagatgctggcacctccgcccccggggctgccacggctggcgctcccccctgccaccaaacccgccaccacctccgagggaggagccacgtcgccgacctcgccttgtaagcacgcgggaagcggtgccctggtggggcggatgtccgcaggggggcctgtcccctccccagccccactgccaggtcagaggtcaggcccgaccctgcagggcctggcgagtttggtgggtctccggaaaacagcccagtggccacgtggttgggcccatgtagggctgaggcagccttaggggctggccggaccaagcctcgggccagggtgagagtccagggtctgtccccttcgccgagtcacctgggggaccccggtgcccgccgtgggccgtcagaaaccctccctggtatgtcaggcagctgacagtggacacggatctcacagtggcggcccgagggccagactcgacccccagactggtcttttgtttgtggagaaagagaatcggttgttatcattttaaaatcaggacgttttacataaacatttccagagttctggcttcttggggagaaaggagctacaccaggcccagttcctttgggtgacctgggctggaccacacctttagatgggactctcttcgcctgtccacctgacctggaagcccctgggttggcggctgctgcaccttctagatttttctgctctctggatgtggttctgggtggctgctggatggcccctcggtcctggcatccctgtcctgaggtccaccccattcgtccgcagtggctctacccccagactctccccacgacccccatgcaggcttgggtgggtcacccaccctcacagggcgccagacatctctgaacccagagacctctccccatggactccatctgcccctcacccccctttttgagcatctctgtccctcactctccaaatgagaccccccaccccacccaagcagttggtggccacggttccttctaggtgccctcagctcctcttctccctgccccggcgttcctgtccccgtccccactgcgtgccagaacccaggctgcctgcccataaaaaccggcttctgatcactggctggaggagatcagccccaaatccaccctgggctggaatcccacctctgcagctctctcactgtgtgacctcaggcaggtgtcttcccctctctgagcctcagttttctcagctgcaaagtgggtttgccttggtgcccaattcacagggcagtgggggacaagccggtgacatgggtcagggaggcagagaggacattccatgtggcgcctgatgctgcgtggtgtcaggcagctgtggtcattcttgccggctgtccctgcctgctcatctgtgaaatgggagcgttgactgcataggatccagtcagggctcagtgggatcatgcccagagcctggtattcagtagacacttaataaatgcaggatactgcgtgggatccactcagggctcgatgggattatgcccagagcctggcatacagtagacacttaatagatgcaggatactgtgtaggatccactcagggctcggtgggattatgcccagtgcctggcatacagtagacacttaatagatgcaggatactgcgtaggatccactcagggctcggtgggattatgcccagagcctggcatacagtagacacttaataggtgcaggatactgtgtaggatccactcagggctcagtgggattatgcccagagcctggtatacaatagacacttaatagatgcaggatactgcttaggatccactcagggctcgatgagattatgcccagagcctggtttacagtagacacttaatagatgcaggatgctgcttaggatccactcagggctcggtgggattatgcccagagcctggtatacagtagacacttaatagatgcaggatgctgcttagtatccactcagggctcaacgggattatgcccagtgcctggcatacagtacacacttaataaatgcaggataggcatggattccacccccctttccctgcaccggggctcttaactgcaaatctactcctacttctccccataagcctcgctgcctccagctccccccaaccccagccaggacaacttggggaccctgcctgttgcagcttcttctccccctacctgggtcccggcctgtctgaggcccccatccctgctgtagccccaggccgtgagttactcacacgccgacaaaatataatcgctgaggctgaaatataaatacgcacatctgtatgtatgcacacacccagccctccctctgccctctccgggaggaagattaataaataaaacgccctcaataattcatgcaccccgcgcggaggcagccctcagtggcaggaccgggcgggcgctgcccaccctgaataattcacgggcggttttgtgaattacagagccatcctgccttccctctcagcagacaccccgcccacctgggcgatctcagccgtgacccccgggcccctcgagtcaggatccccgcctcccaaggaccttgggcctttcaggggggcccggttcaactgggggtagggcggcaggctcggaggccccaggcactgggtgcagaggcccggctgtgtgacgcctggcggtggccaccctctctggggccagggccgccccggctcccacaacccctcgctaacgggctctcggtctctctcctccctgcagcctactctccgcccgacacgtcccctgcaaaccgttcctttgtgggattaggaccaagggatcctgcgggcatttatcaggcacaggtaggggccgagaggccggctggtggggtgggaggggcagggcagaggggccggcccggggggctcagggcgaagagggcctgctgggtcccacgccacacccctggcacaggggcgccagcctcccacaccccacctgggcctcgagcccccacctggcctctccctgaggccaaatttccctccaccttggtcctggggggatggggtgtggccccagactcagcctgtggggtccccaggagcgtctctggagaccatcgtggtacagctatgggaccagtgtcattaccacctgcttcccatggtatagatgggaaaactgaggcccagagagacaagggggtctgcccagggtcacacagtgcatcaccctccctcctccagcctccatcccccatccacgccgaggcctagagggaccgcggggtggccgggggaaactgaggcagcccatggcggggcgtggggcctcccaggacagcatccaagcccccaccccaggcttcagcccacatctaagccagtgtgaggagtcagggcggagaggcttcgtcagcaggacagacaggatggggcaggggccagcgttcatgttcacgttgatgttcatagtcacgtacatgttcagacggctgcagctgagtgagcatggccggggtcccaccacccctagaaggcaggcaggcaggcaggaggttgacagaggaggctcagagaggggaagtcaattgcctgaggctgcacagtagtctagggagtgggggcgtgggagggcagccttagccccaggcccaggtgtccctcaccccccacccccataaggggctctgtgtaggccaggagtgtgtgagcgcgtcttcgggttatgggtaagcagctggacctttgagcctctgctctctccccggtttgtgttggggagagggttggaggatgtaggagtggctgccacaggcccgggaggtccagactcagagagaaacgagctctgggctacccagcggccacggaactgcagagcgtggagatgtatggggtccccaggggccgtgttcaaatcttccagccactgagggaggtttcctgctgcagagcccacgggcaagggtcacggggcctccccgggaccctgcggggctgtcctggctgagcggatgggggcggggaggggacatggcattccccctccctccctgtgctgggtgcccaggatgcctgtaagcggcccctccctctcttcccaggctccgcaaaaccagccggaggaggaagcagggatggaggctgcttctcctgagttcagaggagatccatgtgctatgggtggagggaatcctgggtcaggggccagggctccagcccagtgctggctcacccactctgaacctctgtctcttcctctggccttgggcacccgcaccaagagcctttgaagggcactgggggacagaaagggcactgaaaggttcaggcttccccacaccccgtaaatattaagtaccctgccttgcacccatagagccccggagagggagtaacttggtcagggtcccccagcgagcagacgtccaggactcctcgctttgggatttgggccccctatggccaacctctcccccgcctggtgctgatggagcccggcattacctctgccacccccaccccacatcgctccctgcccctgcgggaggctgggaacgtcttaagtggttcagaaaccaaagctaataaaagctgcggtgggaggaggcccagcccgcttaacccttccccagcctctgccttggaccaaactctctgaccaggccctcccgccagggcccgggacccttctctcagactgtgctggctccagccccaccccacccaagcctgggagggaagggaaactgaggcaggcaagggtggcacctttctcagcatccctatcttgactggctggactcctctggggacccagaaagggtgggaccagggctggcagaatggggtgtgggggggcactggcaaggggctcagcataggcaatggtgtgggtcgggggagggggagctggctggaatgtgagagatctccggtggcaggggccagacagatgatgcgggctttgctctggggtagtggggagccatagaagggtttagagggagggagtggacacccaccaggcctgggagtcagaactttctggagcacagaaaggaggtgacacattgtcaagaggctctcaggggagcatgggttagggggaaggcgaggtccccaaactgggcatccagggagcacaggtctggggaggaccccattgctgctgccctgactggactaagagcacctgggttgaggccgggcgccgccacctccctgcagaccccggagagagggagggaagaagcagtgagatcccgctctcccctctcccagctcccgctcaaagggccctgagcttggaggcctctcatttccgattctggccagtcagcacttctgcctccgcctcctctattcctggcggattcgcttccctctgccccctcctcccccaaagcctgggtgggcgcgcctttccctctgcctctccggctcccgacaccccccagtccatggactctccccccatcaatatccctccccgtgatctatgctaattgatctcgccctggtcagttacccacccatcgccccatgtccgtccctatcaatccccccactgtgaggctgggtggctctgacgccctggcccctcccctctgtgatgtccttcacgcccctacatttctcctgcacgggaacccacgtaagcagctgggtaaaccgagggtggggggcaaggcgggcattgagccacatgccgggagccacacaggcggctgcagccaggccagcaggataccagagcccaaacctcccccttcacacctactgcctcagtctcccctcagctgagtgggaggatgtggagttgagggtgcccccaccccacccccgccccattgctggggccacagccaggcaggaaggggaggggagggaagggaggagggaggaagggctgaggggaggctggtccaccacggggagggtcacgcccagagtctgtcggttgccaacagaaaccagacatgaggtaatggccaagatgaacttgaacttggctggaggtggggcgctgggaaccactgtggcgccagttccatgggctggcccagtggctgcctggttggaggggctctgttgaatgatttgctgcagcggtggggggcggccccacctctaacctcagttggggagtggaggggtctccccagttccagaggcacagccctcccctcacagtccaccctggatgctccatctggggttggagtttgcgtttccagggcaggggtctggacagcagcttctctgcagagactgaggccggagctgtccccaaatgacgtgaccttgggtacagccccatgcagaactcccctcccttagcctcggtctcccgcctctgggaggttgagagtcatcctcagcccccctgtgcttagtgagcttctgtggagcaagagggggccatccgggggacctgtgacaggatgggccctggacgcccaggacagtgctcagaagatgccaaggggattcctgagaggcaggcgagggggttggccctgggcaggagcagaaatgagagccagagccagacaggcctgagttcaagttccacctctgccgcttccatgctggtgacctcgggcaagttccttgacttctctgggcctcactttcttcacacaaaacagcggtggagggagacctaccccctccttcacggggataccggggacatcattaaagaggagaatttttttttgtttttttttggtttttttggtttttgttttgagacggagtcttatgctgcccaggctggagtgcaatggcacgatcttggctgactacaacctccgccccctggattcagacgattctgctgcctcagcctcccgagtagctgggattacaggcacgtgccaccacgcctggctaatttttgtatttttagtagagacagggtttcaccatgttggccaggctggtctcgaacccctgacctcaggtgatccacccaccttggtctcccaaagtactgggattacaggcatgagccaccgagcccagcctcttgtttactttttaaaaacattctcaaggccatgtgcagtggctcatgcctataatcccagcactttgggaggccaaagcaaacgaataagctgaggtcaggagtttgagaccagcctggccaacatggagaaaccccgtttctaccaaaaatacaaaaattagctgggtgtgatggcgcatgcgtgtaatcctagctactcgggaggctgaggcaagaaaatcacttgaacccgggaggcagaggttgcagtgagccaagatcgtgccactgcactccagcctggtgacaagagcgtgacgctgtctcaaaaaatcaacaaaaaacctctttataaagtgaacaaggcagctgatgtggtggctcatgtctgtaatcctagcactttgggaggaaggagttcaaggccagcctggtctacatggcgaaaccccacctctacaaaaaaaaaaaaaaaactagtcagatgtggtggaacatacctgtggtcccagctactcgggaggctgaggtgggaggatcacttgagcccaggagatggaggctgcagtgagctatgatggcaccactgcactccagcctgggcaacggagcaagaccctgtctcaaaataaaataataaattggctggccacagtggctcacgcctgtaatcccagcactttgggaggccaaggtgggcggatcacttgaggccaggaattcaagaccagcccggccaacatggcgaaacccggtctctactaagaatacaaaaattagctgggtgtggtggggcgggcctgtaatcccagctacttgggaggctaaggcacaaggatcacttgaacccaggaagcggaggttgtagagagccaagatcacaccactgcattccagcctgggcaacagagcaagactctgtctcataaataaataataaatagagaagaaaataatttttaaaatataaaataaaggccaggcagagtggctcacgcctgtaatcccagcactttgggaggccgaggcgggcggatcacgaggtcaagagagtgagaccatcctggccaacatggtgaaaccctgtctctactaaaaatataaaaattagctgagtgtggtggcatgcgcctgtaatcccagctactcgggaggctgaggcaggagaatcacttgaacctgggaggcagaggttgcaatgagccgagatcatgccactgcactccagcctggcaacagagcgagactctgtctcaataaataaataaataatataatataataaagtaagattgagttccagactgggagtgctggctcacacctgtaattccagcactttgggaggccgaggaaggtggatcacttgaggtcaggcgtttgagaccagcctggccaacatggtgaaaccccatctctactaaaaatacaaaaattatccaggtgtggcggtggacgcctgtaatcccagctactcgggaggctgaggtaggagaattgcttgaacccaggaggcagaggttgtagtgagccaatatcacgccattgcactccagcctgggcaacaagagcgaaactccatctcaaaaaataaaataataaataaaatataaaatacagttccagataaatggatcttttgtgtgtggtgtgtaagtatatccccaatgttgcgtgggctagacttatactaaaagaattctgtgttaaccagaactccagtttcactgggcatcctgtactgtgtctggaagcctccctcagagacaaagtcacttgccatgggtcacccagcaggttgttagagcctgggatggggaaactgaggtcacagggttgcaggaggtggggggtgagcgtgggaagaggtaaaccatgtctgcagcagagtctgacccctcgacttctctccctttttctctctccctctttctgtcgccactgggccactcagtcctggtatctgggatagcaaaggtcttcttccctcgccccttctccatcgtcccaggaatcccagggggcagcacagccggcccccggcccacgttttcggtggaaaattagagtgaacaagaacacccctgccgactcccagcccggccaaaaagacaaaacacatagacgcacacactcaggaggaaaagaaaaaacaaaggcagaagaagaagaagaagaaataaaaacccacccaagcaagaagacaaaaggtaaagacgcaacgtttccaactctcgggacgccaaggccgcaggactggagggccaggccccgccacccccacgggagacccgggacagggcgtcttcctaagttattcatctcctctccgcctgctgctcgggaaggacagacgccggccgcccgcccgcgccccggaggccctggctctgtccggagaccaggtgagcacagcctggagcctgtgcccagggccgacaggcgcgacacccagcaaggccacctctccccgggcccccgcgcctctgccggacacggaccggcccctcagcccccaccgaggacgcagccactggggggaaagggagacacagcggaccccggccgggcagcggagaccgcagaggcgggcagggtggggcaggcgagtggtgtcgcgggggtgcgtggcgcttgcgagccctggccaggggaggaagtgaggcccaggcacctgctgcccctcgagggggccctgcctgccgcggggcctccccacaagcccctcccaaagcgccggccgactcgctgtctcgctggggactctttcagccctcgcgcccgcccgtttgggaggagaagtctctatgcaattggccccggcccctccaccccccacccccggcataggaggcccccccacctcgcccggctcacacccccaaagggagggacccacattgcacacactgtaagaaatgcactttccgaggaaggggatgggggagcccggacacccagagctccccgagttgggggtgcccgtctggagcgcccccgtcagcccctggcggtgggaggtgagagcgagtggtttaagtgcctgattaccaccacccgcccccccctttgtccagctgggacacggaatggccgcgggcctcctccccctcccctccagcctctccaccagcccctccagtcaaccctcatcgccgtgcccccccagagctagagagatggggcccctgcgtggcccgaggggcagagctgggcgtcacttcgcaagcgtcctgccctgccggggcgcgggggtgggctctggggaagccggtgcgccccccacgcctccgctgccagtgccttacattctggagcgacccccctccctggtgcctcccagcgaagggggaccgccgtttgcactttcatcgcctaccccgacgcggggcccagctgcgggacgtgcatcacggctgggcccccagaggagagaggaggccgacgccagcggtccccgctcggaacggggagggttttcggggggttcggcgtcgcaccttggggccccccgcagccgtgtagggggcctcccatctgctaagcgtttttccgttgagccgctccaaaaacactaagctggggacgccaggtgcccccccaccccggctccctggccctatccacacctccacccccaccccaggatcgccatctttaggggaggcctgggagggggtgttaggtgttttagggccaccgagctcaaacacaaggacccctccccggcccacccagcccagccccaactgacctccatgcctagggaaaaactccccccaccactgccccctcccccgacccaggccaaagccagggcaggtctccgggtctcacctgctcctagcctcacccccctgcccccgaaaaccagactctcctcccaaactagcctcaggagcttggcgaacccgctcgctcctaaagagaaagacccaggaccctcccccatcacccccaagagaggttcgccatcctctggcctcgagcccttggtccctccgtccgtctgtcctcggggcccgctcccccggtggcccttggggatcaaagcgtgggccgctctccgggagggcgggcgggggagggggtggtcgggttgtgccattggggtgtccggaagcttctcagccagggtgggggtcgtggagtgggggagggaggccagccgggctccagaggggtcagggcgcgacgagaaccaactctttacctaactttgcatggtgcttagtcaaggactcctgcgacctggctcccgaggtcagctggcggcgctgacacacatgcatggcagactatccctggctctatctccctgttcctcgccccctccaccccccacttcctctttaaaaaaaaaaaaaaaaaaaaaaagatacaagaaaaacctttaaaaaaattccatgtttcctaatttgcacgaaattttctaccacaagatgtgccttgccttccgagaataagtattacctttaaacaatatcagcgcacacacatagctgcatgttctgctcgtgtagtttaaaaaaaaaaagacaaaacagtgacatgaaataaaaaataaaaattgaaaagggatgtatttctatttgtaaaaaaaataaaataaaaaataagaaagtgagaatctaaaaaaaaaaaaaaaaaaaaaaaaggaagaaaaaccacgctaaaaatcaagccactgaaaacaattgcccccaggtctacccagcccctggctgtccttggtcctgtctcccctcctgctgtattcaggggtgccccctggtgctcagcctctaccacccccaaccctgctcttgggtacccagaggggtcatttctgaatcccttgcccagaggacagacctccggggcccatcttggccctgggaaagggctctcctctctgattggtccctaggccacgggccggcccccagacaccattcaccgacccactgcaggctgtcctccaaccatggggtggccactccacccgcagccagactccccgctccccacttttcatgcaggctggcatacccctggctcagggtcaaatgctgttccacacccacctcagaggcaccccctctcccctgccccgtgcatccccacccttcttgccaaaggacctcttttcccctatccagagaccaccccaggtggcattctctcccaccttctcctttgtcccccatcccctgtctctgtcttccagctgtgaatatgaagggtatcctgtatgaaacaaaaacaaaacctgatatatgcaatatctgtctgtctgtctgtacccatgggcctggctcagccattggaggcccagccgagggtccggcagggcacagggacagccaggtggcaccgagtcacaggctgtggtccggtggctgagcatgctgttgtcttgtccttgattttattttcttttgttctttttttttttcttttctttttgtttttaactccagcttcctttgctttttacttgaccaaagctaagacaatagccagatggttagtggggcagccaggcagggaggacccagggctgggattctccaaccttaggccattcctgcagccctcaccacctccagcccctccaagcatctcgtgtagggacccacgcagatggtcccattcattcactattgcccccaaccccgggattttgggtggtctccacagccaccatcatacactcatcccgtgttttcttccaaaaagtcacctcagcagcctccccaggcgatacagagggagagcccagaccaccacagctggccacgacattgcccttaagtaatatgcattggccagagagcccgggctggctgtgcacagcattcatgtagctgatttctagctttttttttttttctgccccactcctgagcaaatctgtcttgccaaggaactaggagcaaccggaggcaaagggagtgggtggccccatcactattgggaccatcgcgtccctgcacagcccacacccgggggcccagagtcctgggctggacgccacccttctcaccccgagcttgcctccttggctcacttggcaccttggctgagtacagcaggcaaaagcccataccaggcagcatgttgtggatggtttagttctccccgcctccctgtttcttggaaaagctacagggtccctgtagggcaaaattcccaggcgccttgctgcagacagagtaagacaaaaacaccaggaagcaggattccgtgcccatctctgcagtttgggttcacaaaagggggtgccgtcatccctgggtggaggagggagtgttggttttttgtttttgtttttttaacatgtatgaaactgacatcttctcaaatcttgttccacccccctctggaagcccccatcacccacccctgctatggacaccacacctatgccaggcccccccccccaccccagtctcattctggggtctgcccatgctgtgggaaagaatagggaggcctcccaaatatatgcaaattgtccccattccgtgggggcacctgacaatgacccgggtggagatggggcatggaggagtaggaagacccagccctatttgactggggagaggaggatctggagtccttcatgcccaggtctggaacccaggttctgaccccagggccccaccctgggctggacaatcagatcccaaaggaatgccaaaggggactcggttgggagagccgcttaggggccagacctgggtccccctgcaggtccccaggcagcagacaattccaccttccctgccccaggaccttgagagacagcagcattccaggcacagacagacttggctgcaccccactgtcccttgcaagacaggttctggagccaggagcaactgtccagccctccagaagagacagcaagcagcccccctacccactctggcctccccaatggtactttgacctccagtgtagggctatactatacatatatatatatatatatatatatatatataattttggaatttgtttctcataatacagaatatatagtggctaccttgtatcttggtctggattctctctctgagaccccggattttactttctctttggagggcgctgggacatacatctctcaatccagcttcctccgcatcctcccatcttgccccatttctgccacgtcagacacttcctgagagtctcaccttcaaaatgacaccgctgcccatccattgctcaatggtacagagtgtggggtcagtccaccacccttgacctcccggcagggcaaggtgaggaggcggacccaaagcagtaccagcaggacttgttgccagtgataccaaaacagacttttcccaagcagtgcctcacatgtctgctggtgtggctttgggattctcctgccccacccccccgtccatggcagccccctccccaaggctttgctcacacctgagacaggaaggaggaaggggatccaataggaatatgggccccggaggggaagtcatgcacccccaagccaccaccccccagccttccacgcacatctcctggctggaagagagccctccaaaaaggggacacaggctgccccggcccctcaactgcatccacaccccatcctctcatcttgggtcccagccaggcccccccaaaaccaaagccccctcaagtcctggggtcccagcctgtgcccccagcttcctgcccacccagccctgagcattctcacacagagaaagaacaagcaagggctccagggggacaggatggggcagggcatacagtggggggtgggggggcagctgggaggagggagggacaaaacaaaacattttcctttgggttttttttttctttcttttttctcccctttactctttgggtggtgttgcttttcctttccttttccctttgagatttttttgttgttgtttcctttttgtattttactgatatcaccaggatagtttactctccttctagctttctgcttaccgcacactggataacacacacatacacacccacaaaaatgctcatgaacccaatccggagaaggttccagcaggtcccccaccctcccctcctcctcctacttctcctcttgacagcgaggacaggagggggacaaggggacacctgggcagacccgccggctctccccccaccccaccccgcccctcacatcatactccaatcataaccttgtatattacgcagtcattttggttttcgcggacgcgcctacctaagtaccatttacagaaagtgactctggctgtcattattttgtttatttgttccctatgcaaaaaaaaaatgaaaatgaaaaaagggggattccataaaagattcaataaaagacaaacaaaaaaaaaagaaaaaagaaaaaaatgtataaaaattaaacaagctatgcttcgactctttctggctgtcccgggtcctcttttccatgtcccatgtgggttgctctgtgtcctttggaaaagtgaggggcagaggctgcagggagctggggggaacccccaagccccgtggatgggcaggctgggattctgaaagcttcagatcaagtgtcccctgggggcattagacaatatctggggacatttgtggttgccacgactgggggatgctcctggcgtggagtgggtggaagccagagacactgctcagcattctgcagtgcccagaaccaagattcatccacacaagacatccacagtgcctggcacggagagacctgctttgattgtttggaggggaaaaaaatcagatttgctccctgctcacagtagacaccagggtaagctcccgatggggtggatgacagaaaccagggagacctgcagctcctaggattctcctcctcgccccctccccactcagggtgggattccaatgtgtgcagcctcctaggacctcagcagggtggaggatcatgggacgcagtctactggggggtccatgaaatcccctaacccagggagtctcacccaagggcgatcctgccccccagaggacactgggtgatgtctcagacatccgcggttgtcacgactgggaagtgctcctggcatggagtgggtagaggccagggacgccgctcagcaccctgcagtgcccaggacggccccaccccagagactgatccacagtgcctgggggtgggggagacccactttagatggtggctttgaatgagcttctgaggccagacctgtcccagcaacgctcctggaggctgtaacctcttcccctttgtaggatgggctgtttcacaccccttagcctttgctcattcctgcctccccatctgtgcagacctttcacactggtgtcctcttccaccaggaagtcttcccacctttctccagcctggttccctcccccagcagtctcagagctatcggtgaattccatgaggcatctacggagcacccactctgtgccaggcacaggggattccatcccttcccttgtgccttggaggaatccaagcctggcacacagtcggtgctcaataaatgcacaaaatagcttctcttgctacctggcaaactcccagtcattgagcaaagacttcctgagcatctcctgagtaccaagccccaggacccagcagtgaacaaaacactcaaattcagatcccgtcttggagcctacagcttcctccaggtcaggaagaacagtgaacaacaagtagaagtggccgggtgcagcgactcacacctgtaatcccagcaatttgggaggccaaggcaggaggatcgcttgagtcaaagagttcaggaccagcctgggcaacatagaacccatctctacagatacacttaaaaagttagctgcgcgtggtgacacacctgtagtctcaggaggctgagataggaggattgtttgatccctggaggttgaggctgcagtgagctgtgattgcaccattgctgtccagcctggagtgcaacagagcaagaccctgtctccaatcaatcagtcgataaaatagaagtaaaagatgtcagaggaggtaagtgatgagtagggcaatgaacagaggaagggcggggagtggtcccatctagacagatctggagggagggagggaaggagcgtcctgaaattctggcagaagtcacagctcctgcaaaggcccgagggcgggaccatgcctgcttcattggaggaacagtgaggaggcctgtgtggctggagcagagtgaggagagggatggagggaggactggagggcagggaagggacggggcaggtcattcagggccttgtgggccacagggaaaatgttgacttttcccctgaaggaggtgggagccatggagggctgggggcagaaggatgggccccaacatggtttcaatacaccctcggccaggaagccttcctcacctgccccagcagagcttctgcccccaatcactcctgacccagccctgaccattcaggggcatgaccgtgtccagctctgtcccctccagactgggggcccctcccacactgaggtcagaggggagggaggctggggcccgggagaatcaggagtgtgaaaggggctgggtgcagtggctcatgcctgcagtcccagcactttgagaggtgggaggatcacttgaggtcaggagtttgagaccagcctggacaacatggtgaaaccctgtctctactaaaaatacaaaaattagccgggtgtggtggtgcgcccctgtaatcccagctactcaggaagctgaggtgggagaattgcttgaacccgggaggtaaagaccgcaccactgcactccagcctgggcaatggagcaagaccctatctcaaaaaaaaaaaaaaaaaaatagccaggcatggtagtgcattcctgtagtcctagctacttgggaggcagaggtgggaagatccctcgagcctgataggtagaggctgcagtgagccaagatcacgccactgcactccagcctgggcgacagagcaagaccctgtctcaaaaaaacaaaaacaaaaaaagagtaaggctagttcttgggggggctgagatggggccctccatcctgtccccaactccaaaaccccaaaagaccccaggttgggccagaaaaactctctttgcaccatgggctccttccatcctacccacaagaccacaaggcggggacgatccttttttgcaaatggggaaactgaggcacaaagaagcgaggtaaggtgcattgacagggcagcaggcacagtgcgtcctcgctgacacgaccccacgctgcttcctggtgacaggcaccgaggacaccgaggatgggggggtccgaggccccttcccacgtcccactcccaacttgggtcgcccccactcaccctcagcagcgagattttggcgcccccttgtgggcaggccggggacacccccccaacctcccccatcccagttcctctctgcagcgggaaacgggggctccagtcaggccagaggaggcttcttgtagagcaggggttgagccaaggtcagggggtctcagctggagtcaggggatcagccagggctggggtggaaactcagcggtggaaacttagcctccccttggatcttacggaaagcctcggtcgtgtccagcccttggcccctgggtgatgagattcctggctgggaggggagggctgtcccagtaatgcaggctgttgggttggtcacccctgactccccaccctaaaacgggggaaggcttgtgacaacccaaaatgcccccgcaaaaaaattccaaatgcggccgagtgcagtggctcatgcctgtaatcccagcaatttgggataccagagatgggaggattgcttgaggtcaggagttagagaccagcctgggtaatacagcgagaccctagctctatcaaaaaataaacataaaattagctgggcacggtggctcacaactctaatcccagcacttttggaggccaaggagggtggattgcttgagcctgggagttcgagaccagcctgggcaacacggcgaaaccccgtctctactaagaacgtataaattagccaggtgtggtggcaggcgcctgtaatcccagctactcaggaggctgaggcatgagaattgcttgaacctgggaggtggagattgcagtcaggtgggatcgtgccactgcactccagcctgggcgacagagggagactccacctcaaaaataaaattttaaaaatagctgagtgtggtgatatgtgcctgtggtcccagctgctcaggaggctgaggcagcaggaccgcttgagcccgggaggtcaaggctgcaatgagctatgatggaatcactgcactccagcctgggcaatagagcaagaccctgtctctacaaaatatttaatttttttttagatttccaaacgccccctagtggagaagtcctgccccctgcactccagcctgggaaacagagtgagaccttgtctcaaaaaataataaccatcctggctaatacggtgaaacgccatctctactaaaaaatacccaaaaaattagccggaagtggtggtgggtgcctgtaatcccagctactcgggaggctgaggcaggagaatcgcttgaactggaaggtggaggttgcggtgagccaatatcgggcccttgcactccagcctgggcaacaagagcaaaactccatctcaaaaaaaaaaaaaaagaaaaaagaaaaaaagagaaagaaagaaagaaagaaaagaagaaaagaaaagggccaggagcagggactcacacctgtaatcccagcactttgggaggcctaggcaggcggatcaactgaggtcaggagttcgagaccagcctggccaacatggtgaaaccccgtctctactaaaaatgcaaaaattagccaggcatggtggtgcatgcctgtaatcccagctactcgggaggctgaggcaggagaatcacttgaacccaggaggcagagattgcaccactgcactccagcctgggtgacagagtgattgcaccactgcactccagcctgggcgacagagtgagactttgtctaaagaaaaaaaaagaaaagaaaaaggtcctcattaagaaatggtcattgtggccaggctgaggctggagaactgattgaacctggaaggcagaggctgcagtgaaccaagatcacagcattgcattccagcctgggtgacagagcgagactccatctcaaataaaagagaaatggtcattgttcagggtaaggtccagggcctggagaaggtgaggggaagcaggagaacagaaactgggaaaaggaagtgctagtccctttccaagatattgcagggccctggggcacccccaccctccaagatacagctcccaggaaaaaagtcacgtgccccaaaacaaagtgaggtgggggaaggagcaaagatttgcttggagacggcgctcagggctcaaagtccagggctcaggacagcaaaaaaccagattgccgggggagtgtttaatctgctcagggcgtctgggcacctgtgcaccctgagcctccatatcatccgcccagccatcgcccgcagccccaaaagcagcctccttccccagaggtaaactgagtcccaagagatgacaggagcccttccaaagggctgttacgaatgctttaatgcaggccattgggaagcagctctcagctggcagtgggtgcatgggagaggggaagttctgttcagtagacatcaggcagagagaaaagaaatcaggcagtggggagaagcaggtggagccatgagatcgtggaggattgcgggtgtctcctcaaccagggatgctctccgagtataagaagaatcaccaggcagggaccaagctcaggaagaggggtgcatgaaaaccatgtttgcccagagagcccccaatgagggaggtggggtgggttccaagccttcttcacttgagaacactgtattctgaatcccagatggagtcatttcacgggcttcaagtccagggcactgcttttagggggcagaagaggcatctctgggggactgcctggaagaggcagccaggaatcttcacatgactgtgctctttgctctctcatggtctccgggctctttttcctccagatccagtcccaagttgctctctccttcctttgctgtctttttctccttcttcctcttctcttctttctccttggcctctttcttctctctcttgtcttcactgtagggatacaaaggccccaaaccataataagaaacagagacactcctatttaatggccactcacttgagccagcccatgtgatgagtattttacaagcggtatctcagtgaatcttcaaaataaccctaactacgcggcctcacgatttccatttcacaaagacagcaactaagactcaattgctccatggagggatggatgggtggatggatggatggacataagccaaaggctccctgttgcctcttgggactcagtttactcctggcaaaggaggctgcttttgaggctgggtgcagtggctggacagatgatatggaggttcacactgcatatcatcattgcaactaagactcaactgctccatggatggatggataggtgggtaggtgtgtaaagaagttagggaatagatgggtagatgagtggacaggtgggtggatagtgggtgggtggatggatgatggatgggggtatggatgactggatgaacgggtggatggctaggtgggtgagtggttggaaggatggatggatgggtgggtgggtggatagatggatgatgaatggatgagtagacagatgaatgggtgggtgggtggatgggtgagtggatagttgagtgggtggacggatggtaggtggataggtgatggatggatggtgggtgaattgatgggtgggtgggtggataagtgaatgggtggatgaatggatggatgagtgggtggatgaattaatgaatgggtgggtgaacagatgggtgactgagttggcgaatgaatggatgagtgagtgtgtgggtgggcggatgatggctgggtgattgatggatggtggatggaaggatgatagatggatgggtggatggatgaatgaatgggttggtggatgaatggatggatgggtgggtggatggatgagtagataagtagttacatgaatggactgctgcatggaggttgaataaatgaattggaagataaatgaatacattgcaggaaggagagactgatggatcagtggatgggggtatgcagaatggagaatgggtggatgggagtatagatggatgtatagatcaatgaatgaatgtataggtggatggatggatgagtagataagcagttgggtgaattgatggttgcatggagggagggacagattaataagtagatgaatggatgaattggaggaagaagagaatgacataccaatggataggtagatggaggatgaatgagactgtaggtgggtggatggatcaatgagctaatggatagatagactgatggatggacagttggagagtgaagactgcatagttcgatggacgcataggtgggtgggtgcgtgtatcagtgagtggacagatcaatgggctaatgggtaggtggactgatggatgggtggttggagggtgaggactgcacgggcagactgatagatggatgtacaagtggatggttgggtggatggatggaggattgaacaaggcagaaaggaagctacaggtacaggtgcacaggtgggatccagatcccccagtacatcctgggagtaggaatcatattttactggggctgagccaggtcttagacaaagccaccactcaggtcctctccctcaggcacatcttggactcagctgagactctcccagccaggctggtcacctcccagctcccactctcctactcctgtccccaagcctttgcccaagacagagcccccagccctggatggatggatggatggatggatggaaggatggatggatggataaatgggtaggtggatggatggctgtgtgggtggatgaatgagtgaatagatgggtgatggatggataggtgatggatggatggatggatggatggatgggtggatgggtgggtgggtggatggatgatggattgatgggtggatgaatagatgggtgggtggatggatggtgaatggatggctgatggatagatgggtgggtagatggatgggtgtgtgaacagatgagtgggtgggtggatgggtgagtgggtggatggattggtgaatggataggtcggggggtgggtgagtgaatagatgggtgatggatggatggatggatggatggatggatggatcatggatggtcggtggatggatggtgggtgggtggatgggtaggtgatgaatggatgggggtgggtgatggatggatgagtgatgaatggatgggtgagtgggtggacgggttggtgaatggatgggttgggggatgggtgagtggatggatggatggatggatggatggatggatggatgatagacagatggtgggtggatggatggtgggtgggtggatgggtaggtgatgggtggatgggtgatgaatggatggggggtgatgaatggatgggtgagtgggtggataagtggtaggtgaatagatgggtgggtgggcagctgggtgagtgaacagatgggtgatgaatggatgatggatggatggatgatggatggatggatggtgggtgatggatggatgggtgagtgggtagatgggtgagtgggtggatgggtgagtgggtgaatgggtgatggatgggtgagtgggtggatgggtgagtgggtggataggtgagtgggtgaatgggtgagtgggtggatgggtgagtgggtggatgggtgggtgatggatggatggatggtgggtgatggatggatggtgggtgatggatggatgggtgagtgggtgaatgggtgagtgggtggatgggtgagtgggtgaatgggtgagtgggtggatgagtggatgatggatggatggatggtgggtgagtgggtgaatgggtgagtggatgaatgggtgagtgggtggatgagtgggtgatgggtggatggaagatggaggtctgcatccctgagtcctctgtgggaatcctcaggttgggaggcagtcagagccataggaggcactgagtccaggtgggtcgcccatacctaggccttgtacagacacctacacaatcctacaccacagtcttcttcaacaggtatttattaagcacctcctgtgttccaggcccaatgctgggtatgaggacacagccaggacaaaagctaagttgcctacacaactggaaggcaccacgtaatgtctcaaaattagtgaacaactaagacagctccactggtgataagcatgaatcagacttggggctggggacagtgtcaggaaggctggtggccaggctggaaacccctgactagggactggaggaggagaaggagctgccagaagatacaggaaaggtgaagatcccagggcaggaatgtgtttgaaggattcaggacagcaaggtcatctgcgcacacccattcccccaccccgaggaggggttcacacagacccccagcatccgcacgcatagtacctctggtcctggtataggttggactccattctgaacgtggtctcctcctcgtcctcagccctgcagagataaagggaaaggtggaagggggcgggagaggagaaagggggcggtaaagggaaggaagcggtgtgacagcctcagcctctgtcccaacctcccagccggggctcatgaaccccaggacgcaaggaagggctgggctgcctggctcgttgtcttggggagacgggcgggtgcaagcccgggatctgggctctgagagtagaggttggaggagcagcagggaaatgggagaccttcggactttgaggctggtgatgggggtaccagagagggttgggaagctgggggtgggggcagggctgtgggggcagcggggtgggggcgggcacccacctggccttggaacaccagaggcggttggccagcaagaccaaatagacgatgaacaggaagccgactaccgcagccaggcccaccagccacggcttcaggcgatgctccgtggctgcaggaagttggggaggttcgactcagaggaagaaaaggtcagaagacccccttcccccaccaccctagcaaggagagagagaaggtcactgggggtgctccgacagagggggtattggaaagggacggagcttcagagacctggatggcgtaggggggtcgggagggtttagagagggggagggtaccttaccagagtgggagggagcctgggggcccagagaggggaggggcttataaaagaaggggggcttagaggggacggagtttacaaatcaggagggctcagaaggggcggggcttataatgcaggcagaggctcagggggaggggcttataaaggcggacctcagaagggcggggcttatgacaaaggagtggctcaggggtggggtttataaaggagaacaagctcaggggaggggcttatgaaggaggaggtggctcagatggggagggcttataaagaagagtctggggggttggggcttacaacagaggagctgttggggggagcttataaaaggaggcagaggcttagagggaggggcttataaaggaggagctcagaggggaggtgcttataaggggagagggtctcagagtgggaggggcttataaaggcggcagaggctcaggaggaggggcttataaagaaggaggagctcagaggggaggggcttacaacagacgaggggctcagggaggggtctataaaggatgagtgagaaggaggggcttacagaggaggaagaggctcagatggggaggggcttgtgaactagggggctcagagtgggaggggcttgtagaggaggcagaggctcagggggaggggcttataaagaaggaggagctcagaggggaggggcttacagaggaggagggactcggggaggggtttataaaggagggagagtgagaaggaggtgcttacaaaggaggaaggggctcggatggggagaggcttgtgaactagggggctcagagggagaggggcttatagaggaggcagaggctcagggggaggggcttataaagaaggaggagcccagaggggaggggcttacagaggaggaggggctcggggaggggtttataaaggaggaggagtgagaaggagcggttcacaaaagaggcggggactcagatggggaggggcttgtaaaggaggcccgagctcagagtggggccgagctcaaggcggggggttcagccaggtgtgctcagaagggctggagaggggaaaggctcgggtgggcggtggggggtcccttacagaggagggcagagcccagcgagagggaggccgggcggtactgcgggggttgagaagggcctccaagccactcttccttttcttcctgccccctctcctttttctcgccatggaaaattgggagatggtgatcacctgaccaactcccctatcccgcgacgccccctcccgcccccctgcacctaccctgctgggcctccaccggggagaggagcagaaactccagcaccagaagggcccccagggtctccatgacggtcgagtgagccagcagccagccagcggcggtcccgggtcggcgtccacaggtttggtgtgggcgaggccctgcctccccgtgataaggcacaggcggtccccgggcgggggatgcctgagacctgggagcggggcccgcccctggcaccacctgattgggcatcctgcccctcccctgccagctcctgccccatcgctctccctccgggaggccagactctggacctgtgtaacaattaactgagggagtccctcctccctgcaccctgccctggggaccatcagcctcagggccacccctttgtgatccctgctgcaggggctgagctgagatggctgcgacctcccgtcccggcccaggccccgtgccactctggacacagggggaactcacaaatacaactggaatatcttaagaagggtgcgcccacccagtgcctcacacctgtaatcccactacattgagaggccaacgcgggcagatccttgagcctaacctgggcaacttagtcaagccctacctctacaaaaatagaaaaattagccaggcgcggcgggcacctgcaggcccagctactagggtgtgctgaagtgggaggatcacttgagcccaggagtttgaggctgcagccagttatggccgcaccaccgcactccagcctgggtgacagaggaagaccctgtctcaaaggaaataaaaaaaattagaaatacaaagagttaccaaggctgggtacagtgtctcacgcctgtaatcccagcactctgggaggctaaggcgggagaatcgcttgaggccaggagttccagaccaacctcctcccgtctctaaaataaaaaatgtaaaacttagctgagcatggtggcctgcacctgtagtctcagctactcaaagagactgaggtgagaggatcgcttgagcccaggagttcgaggctgcagcgagctacgactgcaccactgcatgcaccaccgcactccagcctgggcaacagaacaagaccttgtctctcaaagcaaatttgagagtcaccttttgtgctctcagagtacacatgaggctccgtgctcggcaatttcacagatcgcatttccttttcttaacaccccgtgaaatggtgccggtctcattgtgcccaggaaagtcaaggtcacgcagcaggtctgacctgggatttgaagccgggtctgcctcgcccccagcttatcctgcctcgcccaggctcttggcccctgaggacccacaagcagccatgggagcacacagggacagggaaggtgtgcagaggccacatgcccgtggtccacctgcaaaccgggacgctctcacgtggggatgcccgggagcgttgatgactcaggctccaggctctcctgtcctcaaccttggtccctcggctgattagatagtgggccctgcccgggcgaagggggaccccgccccagctgacacgggagcagccatggcccagacgagtggtaggaaggcccggcgtcatcgcacaggtgtttatggagcgcctgctgagtcgctgtcacttcctctcttccggaggtctgcggatgaccgctgagcagaccggccactcagcaggatggggctcacacatcccagccccaggatggccacaggtctgcttgaaccagccaggcaggcatctattaaactctgactgtgtatcccgtcttgtgcagggcttggaagagaaggaggccttggtgctgtctgggagctctcgatctgattaggaagtcaggaccaccccccagagacaagcaaacccagcagccgaggcgggggctggagaagatttggaggtaggggagcccagcagagggggtgggggcaggacccgccttggagatcctgccctccaaagtcagtcagttgtctgggctttttctgagaaaagcactctgtgctctgagaccttggcgaagccacttcatcactgcgtgcctcggtttccccatctgttaagtgggggcgatcagtcctacctcggaggattaaatgagatactgcatagaaaaagcctgctctgcacagcagcaggtacacgctaagcactcggtaaggttggccgataatattacaacgttttaaatcgccctagtgtttctaattcacagtttgctgacggcttggctgaggctgagccgggcaggctctgcgtatgtgaaagtcgccagcgtccaacccccggaacctgccggctgggaaggagaaagccgtccgctgcgaccgggcagctcagggtttgcagaaagggctccggcgcgcgtaagttctgtctacacgaccgccaaagcgtccggaacccggattcaggattcaagttgccatcagcttccagaaggagcttcgggatggggggtccttgaaggcaatggaggggcggcggggctccgggggaggcgggggttcagagggggctccctccccacccccgccggcgtcctcctcgccctgccaggccagggccagctgcaggtccagcccctccaagtcctcgccggtcaggctggggcgcagctcccggggtgcggcctcctggtctggcttcgggccaaacgcccagtctgcggcaagggagctggtgaggcaactccccggccccggccaccctcctctgtcccctcctcagctaggagaagcactaggatcccctgaccacccacccagggtgacccagcatcggccccagctgggtttcggtgggggcagctcaccggccaggtcgtgggcgaggtctttgatgaggtgcccgacgatggcgtaggcgacggccaccaccaccagcgcggccagcagcaggtacagcacgtacctgggcaggcggatgctgtccaggggcggcggccggtactcctcgtacagcggcggggacgggctccagccctcggcctccccctcggccgccagccccggcatggtgtccgcccggcacaggggaggcccggaggtgacccacacagcggaagtattaaggggctttgagctaagaggattgggcggctgccccacggccaccatctgcctgggttaatcacattgtaaatcacttccgcccacccgcaacctacctgctcagctccagccacgactctgcccagccgtccccacctcggggcctccgcacctgcgcttccttctcccaggaacgccctgcccagatttcctcatggccggctcactctcttcattcattcatctttttaattcttattattttattttatttatttaatttttcttgagacggagtttcactcttgtcacccaggctggagtgcaaaggcgagatctcagctcactgcaacctctgcctcccgggtgcaagtgattctcccacctcagcctccggagtagctgggattacaggtgcccgccactatgcctggctaatattattattatttttgagacagggtctcgctctgtcgccctgagtgctggagtgcagtgacgcgatcatagctcactgcaccctcaacctcctgggctcaagcgatccccccgcctcagtctcccaagtagcaggaactacaggtcctcgccaccgtgcctggctcttcattcattcatcgaatatgtattgagcagcgactatggctgggcactctcttaggtgctgggacacagctatgagtaagaaagaccaggccgggcgcaggagctcacgcctgtaatcccagcactttggaaggccgaggtgggcggatcacttgagacaggagtttgagaccagcccggccaacatggtgaaaccctgtctctactaaaaatgcaaaacctagctgggcgtggtggcgggcgcctgtagtcccagctactcgggaggctgagtcaggagaatcgcttgaacctgggaggtggaggttgcagtgagccgagatcatcccactgcactccagcctgggcaacatagcgaaactccgtaacaaaaaaaaaaaaaaaaaagaaagaccaaaacctgacattccagggagggagatggatgctaagaaagaaacataaccttagagtaaatgatatattaggttagaaagggaggtgtggctgggcgccgtggctcacgcctatagtcccagcactttgggaggctgaggcaagaggatcacttgatccagaagttcaagatctctctgggcaacatagcaagactgcatctctacaaaaactttaaaaactagccaggcgtggtgagtgcctgtagtcccagctactcaggaggctgaggtgggaggattgcttgagcccaggagttcaaggctgcagtgagctatgattgcacccctgtactacaacctgggtgacagagtgagactatctcaagaaaaaaaaaaaattgggctgccaaggcatcactgaggaggtgacatttgagcaaagacctggaggaaaaagggaaccagccatgggagatccaggggaaagagagttccaagcagagggcacagcccctgcaaaggccctggggcaggactgtgcctggcgtgttggaggaacagtgaggaggccagtgtggctggagcagagtgagccgggggagtgggggggaggggaggatggggagctgtcagggcaggtcctgcagggccgtgtagactgtgaggaagacttcggcctagaccctgaggaatgtgggagccatggagggctgtgggcagaggagggatgggtccggacccaggtgctcacaggtgccccctggtggctgctttggggagaacggactatgggggccagaggaggagccaggaggggactgagctggtcctagtggaaggaaagtaggcagatttgagatggacattttttttttttttttttttttttgagacagggccttgctctgtcacccaagctggagtgcagtggtgcagtggtgggatcttggctcactgcagccttgactgcccaggctcaagcgatcctcctgcctcagcctcctgagtagctgggactacaggtctgtgcccccacacctacctaattttctgtatttttttttataggaacagggtctcactatgttgcccaggctgctctttaactcctgggctcaagcgatcctcctgcctcagcctcacaaagtgctgggattacaggcatgtgccaccgcacccagccttgggatcgatttttcattaaaaaaatctgtttttagactaaatgcctgcaatgatggtgttgccatttcctgagttaggaacattgcagaggagaaacctggggagaaacacaaggaattccaagtagccaggggccagggaagccaggacaaggcagtaggaggtggtggtgaggaagacctgggttcaaatcccagctctgcccgtcacagcatgaccttggctctccagggttccctggcttctctctacaatggggtgggtaaagtttcctggggtgttgggaggaggaaattcaacaatgtgtagaagtgtgagccttcccgggcgggcgtggtggctcacgcctgtaatcccagcactttgggaggctgaggaacgctgatcatgaggtcaggagttcaagaccagcctgaccaacatggtgaaaccccatctctactaaaaatacaaaaattagccaggcgtggtgacatgtgcctataatcccagctactcgggaggctaaggcaggagaatcgcttgaacccgggaggcggaggttgcagtgagccgagatcccgccactacactccagcctgggcaacagagcgaaactccatctcaaaaacaaacaaacaaaaaaaagtgtgacccttgccaggtggtggctcatgtctgtagtcccagggacttgagaggctgaggcaggaagattgcttaagcccaggagctggaggctggagtgagctaagattgtgccactgtactccagcctaggtgacacagctagatcttgtctctacaaaaaagggggtggctttttattttattttatttatgattttattttattttgagacagagtctctctctgtcgcccagactggagtgcagtggcgcgatctcagctcactgcaagctctgccttccgggttcacgccattctcctgcttcagcttcccaagtagctgggactacaggcgcccgccaccacgcccggctaatttttttttttgtacttttagtagagacggggtttcactgtgttagccaggatggtctcgatctcctgacctcttgatccacccaccgcagcctcccaaagtgctgggattataggcgtgagccactgcgcccggtgagggtggctttttatatttttgtttgtttttgagacagagtctcgctgtgtcacccagactggagtgcagtggtatgatctcctcactgcaacctctgcctcccgggttcaagtggttctcctgcttcagcctcccaaatagctgggactactttccagggttttgttttgttggtggtggtggtgttcttttaagactccctctccctctgttgcccaggctggagtgcagtggggccatctcggctcattgcaacctccacttcccaggtttaagcaattctcatacctcagccttccaggtagctgggactacaagcatgtgccaccatgcccagttaatgtctgtatttttagcagagacaggatttcaccatgttggacaggctggtctccaactcctgacctcaagtgacctacctgcctcagcctcacaaaatgccgggattacaggtgtgagccactgtgcccagctttttcttgttgttttaaaaacattgcagctggtctgtgttgatgggtaaagagaggaaaccaaggaggcaggagagaaaagggggaagggctgaagtaatggctgtgagttgatgagaaggacgaggagttggtgaggaaaagaggtggctcaggcagccaatgtcacattggaaggtgccaccttggaagtggctccttcggccccagttgagccttcagatgaggcagccctggccgacagcttgattgcaacttcatgaaacacccaaagccagaaacatccagatacgcttgctgctcccagactcgtgacccacaggaaaggtatctgtcttctttcctctgtctctgggggttttcttgtcttctttatttaagatggagtcttgctcttgtcacccaggctggagcgcaatggcacacgatttcggctcactgcaacctctgcctcttgggttcaagtgattctcctgcctcagcctcctgagtagctgggattacaggcatgcaccaccacacccagctaatttttgtattttcagtagagatggggtttcaccatgttgtccaggctggtctcgaactcctgacctcaggtgatccacctgccttgacttcccaaagtgctgggattacaggtgtgagccaccgcatccggccttgtctttttttttttttttttaattaaagagatgggggtctcactatggtgcccaggctggtcttgaactcctgggcataagcgatcctgccttggcctctagagtagctgggactataggcatgtgcctctgtgctcaggtccacttttctgtctctgtaaggacactggtcattggatgtagggtctaccctaaatccaggatgatctcatgctgagatccttaacaacacctgcaaagactctatttccaaatcaggtcacattcatgggtaccaggggttaccacctggacaagccttttcgggggacacgatttgacccaagtccagctgtttgaagctgctaagtttggagtaatctgttgcacagccacaaggatcttaggtaagtcttggctagcagaaccaacagttcatcagccagcgttagcaggcaggaggggaggcagcatgcacggcacagggacaggcaggcgggcacagctgttggtggggtgtgcggaaggtctgcttgattttttcactgaagccgaaagcaaggtcatcagctgagtgaggatgagggaggttggaggccaacaagaaagtgacagaacagatcgcaagagagagagccccacggaaccatagtagaatggatgttggctgctcaggaggctgaggtgggaggatcacttgagcctgggagacagaagttgcagcgagcttagatcgagccactgctctccagcctgggcaatagagcaacactctgtctctaaaacataaacaagatggccaggcacgtggctcatatctataatcccagcactttgggaggctgaggagggcagatcatttgaggccaggagttcaagaccagccaggccaacatggtgaaaccctgtctctactaaaaatacaaaaatcagccaggcatagaggcatgtgcctgtagtcccagctactcagcaggctgaggcacaagaattgcttaaacctgggaggcagaggttgcaatgagctgagattgcaccaccgcactccagcctgggcaacagagtgagaccctgtctcaacacagaacaaaacatactgagaccccgtctctacaaaaaaatacaaatattactcaggcacagtggggcaaacctgaggtcccaactgcttgggaggccaagataggaggatcgcttgagcccaggaggttgaggctgcagtaagctgcagtgatcagccactgcactacagcctgggagacagagggagaccctctccatttaaaaaaaaaaaaagtgagccaagcgcagtggctcacgtctgtaatctcagcactttgggaggccaaggcgggctgatcacaaggtcaagagttcaagaccagcctggccaacatggtgaaaccccatctctactaagaatacaaaaattagctgggcgtgcatggtggcacgtgcctgtaatcccagctacttgggaggctgaggcaagagaatcacttgaacccgggaggcagaggttgcagtgagctgagatcacgccaatgcactccagcctgggtgacagagcaagactccatctcggggggaggcaaaaaaaaggctgggtgtggtggctcatgcctgtaatctcagcactttgggaagccgaggcgggtggatcacctgaggtcaggaatttgagaccagcctgaccaacatggtgaaagcctgtctctactaaaaaatacaaacaggccaggtacggtggctcacacctgtaagcccagcactttgggaggccgaggcaggagatcgagaccatccaccatcctggctaacacagtgaaaccccgtttctactaaaaatacaaaaaattagccgggcgtggcagcgtgcgcctgtagtcccagctactcgggaggctgaggcaggagaatggcgtgaacccgggaggcggagcttgcagtgagtggagatcgtgccactgcactccagcctgggcaacagagcgagactccatctcgaaaaaaaaaaaaaaacaaaaaaaaaatttagctgggcatgatggtgcatgcctgtaatcccagttacttgttaagctgaggcaggagaagtgcttgagcctggcaggcagaggttgcagtgagccgagatcacgccattgcactccagcctgggtaataagagtgaaattccatctcaacaaaaataataaaataaattaaaattaaaaacctataatcaaacatgtgacttccaggcaggtttctcaacctctgcactcatttggggccggatcattctctgttgtggggaccgagtgctggaggttatcttccagcatccctggcctcccccgactacctgactagatgccagctgcacacccccaccccccaccccatgacaagctaaactgatgccccggggcaggatccagcactccggtggagaacatggctcagtggatagtcggttcccgttgcgttttgcctcctgtcttctggttttggcctctctggctgcagaccaggagctctgcacctgagattctaccgctatgcctattttacagagaggtaagtgggctgtccccagccacacatggaagggctgcgggagccggcggaggaagccatgtctgggctctcagctggaccacagaaccccttccactgcacccacaacaggagctgggggaagacgggggtccgggaagggccaggctggagggctgtttccccagagcccacttggagggagctggctgggcagatctgaccaggtaaccgcacataaaacaggtgcaggcctgcctgtcgctggtggtggctcagtgtcagcagcaggacagatcctagagccaatggctgcggatacaaccgtctccccgcccagacgccacacactctcggggaacgttccctgaaagcccccacccctccctccctcccacgctcccctcacccaacacactcagaggagtcagtgcttggcaaaaataatttaatattccatctgggcagcgctctgaggtctgcttgtccctccctggcccctgtgccctacctgacccactcagggaccaccaccctgtccctacccaggcctcggggtgggggagtcagaggcccccagaccctgtgtcccattcctagtgaagctgaagccaccataacgtcagcctcttcccagagccccagctctgcccctggcttccctcgcgatcctcccctggctcccctcgcgatcctcccttggcttccctcgcgatcctcccctggcttccctcgcgatcctcccctggcttccctcgcgatcctcccctggcttccctcgcgatcctcccctggcttccctcgcaatcctcccctgtcctgagccgggcatcccagagcctcccgcagagtcccaccccaagcctggaaacttccacgctacagccctgcgccaggccccgaggagcagtcaggggactcagggagtcacagcacaacggcagctcctcggtcccagacggaggagggggacagcaaccatgcgcccagcaagacacaagcgatgacaccgatttacacacacccggtttagacgccaaagctctgcgggggaggagcggccctcaagagtcctccgggagctccgggtgagggtggggccctaggagggggccccgcgcagctgctccaggccgtccgcgtactggaaggcccgcccggtctcgtgctcatacatgtccagagccacctcgcagctctcacgcaccacgcgctctgggtcgtccgcgtgagcctgcagcgcggccaggcaggcgggccgggcaatggcgcccagggcctccgcgcactcgtgccgcaccatggggttctcggtgcatcgggccagggcggccgccagctggggcaccgccgcctcgtgctgcagctgtcccaggacgtagccgacctcgtggcggaagagggcgctcccacagtgcagacctgcaggggagagggacactcgctggggccaggaggggtgggaaggggagctctgtcttttcgaagacatggggtcttgctatcttgcccaggcaggtcacaaagtcctggcgatcttcccatcccggcctcccaaagtgctgggacgacaggcgtgagccaccacgcccaacctggggtgttctaccttgaagacacccctgcccccagccccagtgattagggatgcccgggggaactgaccgcagctatgggggcgggaaaagctgggagctatggggaccaagagggacgcttgcacgggttcttaagaggccccatgggaaatgcttggggccaggcccgggatgccgttcccgggggcaggccgcggccccactgcacagatgccatcactgaacctcacagcgaggcactgcccaggaccccaccccagaagcccctcctcaccctcggccagcgccagggcggcctcctcgcctcccgcgttgcgcagggcgaacatggcgcggtatcgctcgaagagcggccgggactcatccagcagcgcctcccgcaggcgccccacgtcacgctcctcagccggcggggcagggtccacggagaggtagggtcccgccgccggctccccgccgtgctgctgcagccactccagcctgcgcacggccagctggcaggtctcggccacctgcggggagggggtatcaggcagcgggttggccctggggggtcgcaggggcccttccccaccccccgggatggcagcttagcaggggagagagacactggcagggtgactaacccatcattccaggcaggaagtaagccagcaggggtggctgacttgtgagtgaccgggggactggagggctggggagggcctcagggaggaggtgatgtggaggcagagacctaagccagcttagggagggaatcaggtggagacccggggatggggaagcagcggtggaaaggccctgaggcaggaccctgcgggaggggtgagggccaaaggaacatgtgcggccccacctgaccaggtaaggcctgcgggccactgtaagggcttgggattttgtcctaaaggtgatgagatatcgtgagagctttaagcatggaacagaacagcagaattgagtgtcacacgtacccccggctgccccggaggaggagagactgagggtcggggtgggatgtggacaagaagtggcaggggagaaaggaacatgcatgtccgtggcggcataactcataacagctaaaaagcagagacaattcaagcatccagccacagtgagtggacacagcatgggccgtccacaccacggaacgtgactcagccacaaaaaggaatgacgggccggccgaagcggctcatgcccctaatcccagcagttagggagaccaaggcaggaggatcgcttgagcccaggagttcaacaccagcctgggcgacagagcgggacttcatctctataaagaaaaaactaataaaataaaaatttgtttcatttttgggccaggcgcggtggctcacgcctgtaatcccagcactttggaggccaaggcgggtggatcacgaggtcaggagatcgagaccatcctggctaacatggtgaaaccccgtctctactaaaaatacgaaaagatttgctgagcgtggtggcaggcgcctgtagtcccagctactctggaggctgaggcaggagaatagcatgaacctgggaagcagagcttgcagtgagccgagatcgcgcccactgcactccagcctgggcgacagagcgagacaccgtctcaaaaaaaaaaaagaagaaatgttggaaggtagcaggagatctctgaagaggtctggtgggccaggacaaggtatcagaggtagagggcactgggtgggttcagaggggtcttggcagagggactggacgtgggggttcagagaaagggggtcaggccggctcaggggctcaaggcccgggatggaagcgggtgagcaaagctggttgtcgccgttttgccaaatggggcgcagcaagtgtctgtccagattgtcgccctcgccttcctcatccctggggcatccttggccaagtggtcgccctggcaaccagagatggggagggtctgaggctgctccaggtcagggctggggcagggctgggcagggcttcccagggacccgagactggcagggagacaagcaggggcctggttacctcgatgacggggtccgaggaatactgcttcaggatctccagaacttccgggtccccgatggcccccagggcctcccctgggaagaagcagccggagagctcatgttggtggggtggatgtgtggaaaatgcccggctacctctgggaccggaggacacccctcccagggctctgccactgtggggaagccccgcctctgtccacggctgattggagcagcagtcggtacaggctccccgctggaccaatcagcatcccctccccagagcaaggcactgcctggaaccgcacctggctgccgctcagagcaaaatggaccccatcccggcccgtaccatgagacagggagacaagtatatccctacaactcgggatcacagctgacaagcagctccaagaacccaggaggtcgggggtgcagtgagctatgatcacaccactgtactccagcatgggcgacagagtgagaccctgtctcaaaaaaacaaacaaaaaaaattcccaaaacaggccgggcctgccggctggagactccagaatttggggccactggggctacacttaggtgggttcgggtacaggcgcaagtgcaggcgtcgcaagcccaggtcggagcaaggctggcggcggctccccgtagagccctgggtgcagatgttccttgaattttctcagaatcgagctcaagggccctgcctgtgaggcagctgagctggtggcttttgcctttcctgaaggttgcggtttgcgtttgtgcacctgcctggcaggctccctctgccgggaaaagtcccgtatgcgccaacacaggctctgtgtcaggcacctcccacgcgctaattgcaaatgagctcactggttacagaaacacagtcccagtggcacagacgcaccaactacctgcctcactggtctccttcgctgtctaggtccctcgctacaacagtccattttttttttttttttagagcttcgctcttgtgacccaggctagagtacaatggcgcgatctccactcactgaaaactccgcctcctgggttcaagtgattctcctgcctcagcctcccaaagtagctgggattacaggcgccggccaccacgcccagctacttttttttgtatttttagttgagacggggtttcaccatgttggccaggctagtcttgaactcctgacctcaggtgatccacccgcctcagcctcccaaagtgctgggattacaggcgtgagccaatgcacccgacctgaacagtccatttttttgagacagggtctcactctgttgcccaagctggagtgcagtggcatgatcatggctaactgcagcctcaacctccctggctcaagtaatcctcctgcctcagcctcctgagtagttgggaccacacgcgtgagccacgatgcccggcttgtatctgtattgtcactgttttgtctcttactacatgacagagcctggcatacagtaggtgctcactaaatgtgtgtccaatgagtggagtaaatctaatatacattagggattggggatctatggcttgtcgcttgtttttatacgagcaaagaatggtttttaaaacacttttaagggtttaaggcggggtgcgatggctcatgcctgtaatcccagcactttgggaggccgaggcaggtggatcacttgaggccaggagttcaaggccagcctggccaacatggcaaaacccatctctactaaaaatacaaaaattacccaggcgtggtggcacacacctgtaacgctatctacttgggaggctaaggcaggagaatcacttgaacccgggaggcagaggttgcagtgagccaagacggcaccacagtaccccagcctgggcgacagagtgagactctgactcaaaacaaacaaataaatggtttaaaacaaaaaatcaaagggatagtacttcctgatgggtggaatttatatgaaattcaaatctcagcatttacaaatgaagtttgttttttgttttttcacagacaggatctcactctgttgcccaggctggagtgcggtggcacgatcatggctcactgcaaccttgacttcccgggctccagcgattctcccgcctcagcctcccaagtggctgcgactacaggtgcatgccaccatgcctggctaatttttgtattttttctagagacagggttttgccatgttgcccaggatggtcttgaactcctgagttcaaacgatccaccttcctgggcctcccaaagtgctaagattacaggcctgagccaccgccccctgcccagttgaggttgtctgggcacacagccttagccatttggtgacagatgacctgcgctggctttattgagtcgctgtctggctgcagagctgcaggtatttactatctggtgctctatggggcagttgaccactctgatatttatcacctgagtgaggaaggggacacgtggggtcatgaagaagtgaggcaggagggagcaggtgcccgggacacagacaggtgctcacctgcctcatggcgcaccatgggctcctgacgggtgtcttgcagcacgtccaccagcatggggatggcgcgggcatcctgcatctggcccaggcagtaggccagctcgtgcttgagcagggcggaatcgtcatcgaaggcctggctgatccatgcaatggcgcctgggccgccgagcccacgcagcgtgaacagcgcccggaagcgggcctgcaggggctgcttggggtccaccagcgtctgcccgatggcatccacctcctgctccgtcaccatcgtgctgtcaatgggtcccggccttccacaaccctgctcaggctaaacctggggacgcggggatgtaagaacctgtggcagaaaaatgagagcccaggttagaagcccccttcaccagtgcgttgtctgttcctaggacctgggtggggcaaattcctacccactgaccaacctgagcatctacgctgaaagctcagctccaacctccctactagctgtgcagccttccgtaagttgctttccctctctgggcctcagtctctgcactgcctctcgcctataggcctatcagaaatgacctccactgtctgctctccacacagcagccagagggacagctgacccccaaaatggccctagcgatccccacccaatattcaaggctttatatagcgatccccacccaatattcaaggctttatatagtcctctcccactctgaacagggctgacccatgtgaatgccaagaagatggaacagagcaagacttccaaggttagggcataaaaagcacaacagtctcatccttgttctctctctaggggaagccagtgaccatgttgtgaggatgctcaagcagtcttttgtaggggcccacgtggcaaaaaactgagccctcccaccaacagccatgtgagagaagtgggctggcagcagctcgtccagccccaagcgaaccttcagatgatgcagccccagagcgtctccactgaggccttaccagaggccagacccagagccagccagctaagccaggcccagagcaactgtgtgcgacactgtttactgttgttgaaggtaaccaagtatgtttttttgtttgtttttgagacaggatcttgttctgtcgccaggctggagtacggcagcatgatcacggctcactgtagcctcgaactcccagtctcaagtgatcctcctgcctcagacttcctagtggctgtgtctacaggcacacaccagcatgcccagctaattttttttttattatttgtagagatggggtctcacttctatgttgcccaggctggtctccaactcccaagctcaagtgatcatcctgcctcagcctcccaaagcattaggattacaggcatcagccactacccccagccattatggggatttttgttacacagcttagataacagattcagaagtactttcaatatgtaaactggaccatatcactcccttgcttaaaatcctcctatgcctcctcactcaactacttgacagtcccaaaggcccttcatgaccatctcccatcacctcttccctctctagctccactccagccacacaggcctcctcgctgttcctccaacacgccaggcccagtgcagccctagggcctttgcatttgctgtgatctccatgaggaacattcttccctagatgtccccacgtagcaggccaggcctcactaacacaggcctccataactgtttcagcactgactgagtggttaagttaaacattaaaagctaaaagagccagtgccctcatacaaaggctggaatgtaacaaaagcccatgaagagttttgcccaggcctttcctgggccttaaggcatgacaagataatgaaggaatttttttttttttgagacagagtttcgctcttttgcccaggctggagtgtagtggcattatctcggctcaccacaacctatgcttccagggttcaagtgattctcctgcctcagcctcccgagtatctgggattataggcatgcaccaccatgcccggctaattttgtatttttagtagagacagggtttctccatgttggtcaggctggtctcgaactcccaacctcaggtgatccacccgcctcagcctcccaaactgctggaattacaggcttgagccaccacacccagccaataacgaaggaattcttaatgtgacccgtttaggatgaaacaagttttactgggtgtctgaagaactccccaaacctccatgatttagcaggagacaagataaggatgatcaccccagcacctggacccactggagatgagataagggtgatcaccccagcacctggacccatttagattaagtaaatttactgaggttccaaaggaaagtcttcaggattcagatcttagttatagattaaaagaagttagtcactttaagtctttagatggatgctcagttacatgtagatggagagcttagagggtatataagctctggaaaactttgtcattttgagttggtctggcgatattttccaggccttctccctgtaaccggttacagaaataaaaactctcttcctccccagttaatctgcatctcgttattggaccatgagaaatagcagcccgaccctcagtttggtccaggaacacccgtgctcatcctcttgctttcctgggtctccaacatcacttcctcatggaagccttccctgatcacaatggacaatgttactcttccatctcttttcacttattcagctttatttttctccacggcgcctaagactcctagatatcatattggaaagtattggtttagttgcttgtgattggtcttatccctcattagaatagaactctgaaggctgggactgagtctatcttggtcactgttgtattcccagcacttagtgcaatgacctgcacgcagtagggcctcaataaaaacaataaccggctgggcgcggtggctcacgcctgtaatcccagcgctttgggaggccgaggtggacagaccatctgagttcaggagttcgagaccagctgaccaacatggtgaaaccccatctctactaaaaatacaaaaattagctgggcgtggtggtgggcgcctgtaatcccagctactcgggaggctgaggtaggagaatcgcctgaactcgagaggcggaggttgcagtgagccgagatcgtgccattgcattccagactgagctacaaagcaagaccctgtctcaaaataaataaataaaataaaaacgacaaccgtgacaatagcagctgacacttatgtagcatttgctacgcgccaggcactccatgctctttacattcattaattcattcgatctacatcactaccctgtgaggtagttactaagattgtccccattttacaggtgaggaaactgaggcacagtttgggactgtgcttgggaacttgcttgggagcagcgtgaagagttaggaatccaggaagtctggctccagagtcgggctctaaaccaccaacgctttgttgaatgacttaggataaaagaacacagccaaggggagaagggacccctctctttccagatcggctgagaacctggcggatgcttcatctcaagacaggctggctatggcatgctggcagccctctctggtgaacagtggcgtcagcaaggctgcctgggcttgacgagggcagtgtagccacctaagcacaggtgaccatcaaaggagagtgacacctttaaagaggggtcatcagaaaccagagggcaggcctgtgcgagctggcagggcactggggaccattgagacccaaccgtacgacataggagcttcaggacgtgaggtgggcactctttcatgtaaaaaatcccagaggaaagagatcgccgggactcgagaccccttaacccgccccatccacagtcaacgaatccctgagaccggattccctaacgaggcgctcccggtgccaccgcccgccagacccgggccccacaccgtgatcgccgcctccgggacgcctcaccgagctctggagactcaggacccgtcggcccggccagtaaccgcaggcgcctctgccaccaccgcttcacctgccgcgacgcccgcagtgcggtctgggggccgccattttctcgcccacgtgaccgtgccggacggcaccaacgcagccgcgggtgagacctagtgagaggctccgtgcatgagggaggcccggaaggctgagtcggtgctggtgccacagctcatgcaaacgcaggaacagtattcctagtgcgttcttcggggaaggggacgggcaacgtatgccctttcatgggaaaaaattctctccaacctccccactgcggtacaagaagtgagactggtttgtgccgattcagcgccctgcctgggctggctagcaacggagcatgcgcagtgtttctaggcgtggtcagactccagaggtgttggccaatgggctcagggagctcgaaccttaagtaggtgaggaataaaaaaaggaagaaatgcagtcgttcattcattcatgtatgtaataaatagtacatggccttgaggacaagagagccttcagcccttaccctcgtacgcctcccagtgttgttatagagacagaaaataacacgataagtaaatgcaatacctattagatggtgaaaaaggctaacgagaaaaaattcggtagccaagggcggtgtatgtatagggtgtgcagtttcaggaagggtggccagaatctgaggtggtgacatctgaagaaagacctgaaagaggccgggtacggtggctcacaccggtaatcccaacactttgggaggccgaggtgggtgttatcacttgaggtcaggagttcgagaccagcctggccaacatggtgaaacccccatctctactaaaaatacaaaaaggcttcagcttcccgagtagctgggattacaggcatgcaacaccacaccagctaactttttgtatttttagtagagacagggtttcactatgttggccaggctggtctcaaactcctgacctcaggtgatccacctgccttggcctcccaaagtgctgggattacaggcgtgagctactgtgccctgcttgcaatctcttatttttaaaatgtgggtgactgccaggagtggtggctcatacctgtaatcctggcactttgggaggctgtggggtgagaggatgatcgattgagcccaagattccaagaccagcctgggcaatgtggtaagcccccgtctcaacagaaaaaaaattttttttaatttggctgggcgcagtggctcagcctgtaatcccagctacttgggtggctgaggcaggagaatcgcttgagcctgggagacacaggttacagtgagttgagatcctgtcactgcactccagcctgggcaacagagcaagactccatttccaaaaaaaaaaaaaaaaaatcaactgtgcctggtggctcatgcctgtaggcccagctactcaggtggcttgatagcttgagtccaggagttcaaggatccagtgagctgtaatcacaccactggattccagcctgggtgacagagcaagaccccatctcaaaaaaaaaaaaaaaatgagcaattaataaaaaaacatggctgggcattgtagctcacgcctgtaattccagcactttgggaggccaaggcaggtggatcacttgtggtcaggagttcaagaccagcatggccaacatgctgaaaccccatctctactaaaaatactaaaattagcttggcctagtggcgggtgcctgtaattccagctactcaggagtctgaggcaggagcatcacttgaacccaggagacggaagttgcagtgagccaagatcgcgtcactgcactccagcttgggtgacagagtgagactccatctcaaaaaaataattaaataaaaattaatgaaaaaacataaaatgctgtgcatagcaaagaaatccttttggaaggccaacttctattttaagacaacattcacaaatacttattgagcaactactgtgtgctggacagtgtcctgagcacagaggatagtgtcctgggcacagaggacacaggacaaaacagacacagtgtctggcctcatggagctgacacccccacttttatttttttgagacagagtctcgctctgtcacccaggctggagtgcaatggggcgatctcagctcactgcaagctccgcctcctgggttcacgccattctcctgcctcagcctcccaagtagctgggacgacaggtgcccaccaccaagcccagctaatttttttgtatttttagtagagacggggtttcaccgtgttagccaggatggtctcgatctcctgacctcgtgatccgcccgcctcggcctcccaaagtgctgggattacaggcgtgagccaccgtgcacggcccaccccccctttttttttttaaattattgtattgccttcctatgtgttggaaaactgactgcagataacaggcatcactgcagccctcagctgccttgcgaggacgtcatctcaacatgtttgtggctcaggctgtttacggaggacttcccgtggaccaggagctgtgctgactcaggaaggctacgagggcagggtgccaggtgtgactggccccaaggatgctccccaggaggagataatcccagggtgcaggacgcagatatcgaagcctcagccaaaagcaaggcctgtgtaagtcagagaacttggcatctggcctctgtagaccttcgagaaactgatagcacagaagaaccaagtctgcgtcttctgttcggtgggtcctctgggattgagcaagtccctggggggcggaagtctggaatccaggtatctgcagatctgtggcctctctggaggctccaggggaggatccttcctgcctcttccagcttctgggggtggccgccagtccttggtgtttctcagcttgtggcttcgtcactccaatctctgccactgtcatcacctggccttgacccctgtgtgtctgtctctgtgtttctgtgttagaatctccctctcctctccttttattttattcttctgagacagagtcttgctgtgttgcccaggctggagtgcagtggcgcgatctcagctcaccgcaacctctgcctcccgggttccaacgattctcctccctcagcctcccgagtagctgggaatacaggggcctgctaccatgcccggctaatttttgtatttttagtagagatgaggtttcaccatgttggccaggctggtcttgaaggcctgacctcaagtaatctgcccacctcggcctaccaaagtgccgggattacagccgttagtcactgcgcccagctcctctttcagatctttattaaaacatcatctttgcaataagagcatccccgagcactgcatctgaaactgtaacctcttgcctcctccttttccctgttctcttttctccttaactcagctccaaaggggatttttttttttttttctggagtgcagtggtgcaatctcggttcacttcaaccaccgcctcccgggttcaagggattctcctgcctcagcctcccgagaagctgggattacaggcgcgtgctaccacgctcagctaatttttgtatttttagtagagatgaggtttcgccatgttgaccaggatggtctcgatctcttgacttcataatccgccctccttggcctcccaaagcactgggattataggcgcaagccactgcgccgggcaagaactttttaaataacagctgtattgagatatagtttacatactgtacaattcatctgtgtaaagtgataattcagtggtgtttagtatattcagagtcgggcagccatcatcacataaattttttttttttttttccgagacggagtcttgctttgacacccaaggtggagtgtggtggcatgatctgggctcactgcaacctacacttcccgggttcaagtgattcccctgcttcagcctcccgagtagctgggactacaggtgcgcgccagcacacccggctcatttttgtatttttagtagagatggggtttcaccagattggccaggctgatcttgaactcctgacctcaagtgatctgcccgcctcagcctcccaaagtgctgggattacaggtgtgagccacagctcacggccatcacatcaattttagaacatatccatcaaccccccaaaataaagtccattccagtcactcctgatccccctctcccagcccttggcaaccactaatccacttcctgtctctatggatttgcttatctggacatttcgtatcaatggaatcactcactatgtggtcttttgtatctggcttctttcactgggcatgatgctttcgaggttcatccaatctgtagcctgtgtccgagcctcattgcctcatattgcaaaacaccgtgtcattgtatgaatggagcattttcccttcatctgtggatgtacatttgggttgtgtgcactttgtggatgttatgaataaagctgctatgcacataggtgtgtgagtttttgcgtggatgttacatgtttgtttctcttgggtagatacctaggagtgttactgctgtgtcatgtggcaattctatgtttaacctttttttttttttttttttttttgagactgagtcttgccctgttgcctaggctggagtacaatggtgcgatcttggctcactgcaacctttgcctcccgggttcaagcaattctcctgcctcagtctccccagtagctgggattacaggcgcctgccacgatgcttggctaatttttcgtatttttagtagagacggggtttcactatgttggccaggctggtctcgaactcctgacctcaggtgatccacccacctccacctcccaaagtgctgtgattacaggcgtgagccaccgcgcccggcccataatttttttaaaaacctgttttttgttttttttttcaagacgtagtgttgctctgtcaccctggctgaagtgcagtggcgcaatctcggctcattgcaacctctgcctcctgggttcaagggattcttctgcctcaacctcccgagtagctgggattaactccgtacctcaggtgatccgcccgcctcggcctcccaaagtgccgggattacaggcttgagccaccgcacctggcctaaaaacctgttttgttccctgctgtctcactggggcctggaggagcagcacttaggagcgcaatgcaggtttgttgaataaattaatgactctcagcagtgacgtttgtacgttcgggacacgcacctggtgttgggtcccatctgcgctcattaggcgcgacgtcaatgccgcactgaggtgtgcctggcttcgatctaccctaggaagggtctgccctggggcgccccattccgcgactgtccccagtgggaaccacgccctccatctaccagagccatttctgcaacgtctagcaccccgcgggtcctcttccggccgcggttgccctgggcaacgcgtggagccgcgcttcctgtattgatttgaatcgcgggagacgtcacgtcctcccgagatgcccaacgcgcgcaggcgcagccactcggagtgggcagggcctggctgggtgttgggcagggcctggcggtgtgtggggtaggcggggggcgtggccgcgattagccgcgcgcggcgtgggggcgtggtcgggttgcgggggtgcgcgcggccggccgggcgcgcgcggcggagggagggagccgggaggcagcggaggagcgaccgccgccatattagggaccgcggagcccgggatcccgtcagcggcggccgcggccgggcctgcgggagctgcggaggccggaggcgggcgctgtgcggtgccaggagaggcggggtcggcgggagccagcgagccacgggagcgagccaggtgaggcggccggggtcggggacccgccccccgggccctaggcggcggagcttgactgcgaccccccaaaaccgggacggcggggcgggctgcgacccccaccccagctcaggcccctccaggagcccccagtcccctcgaatgccgcctcccaggccgaactaggcccgggtgacctcagcatccgcgtctcccgagttaacacccaaatcccagcgtcccccccacgtcggggcctgccgtgacccccaccccgagccacctgtaagtcgtgacctccccgcagccgccgtcagcgtccaccattctttttaaaataggctgagccctgcacccccaaccaggggaccccactgcgcacccctagaacagcagaccccgcctcctaacccgggtgatttctccctggcctgtcatccccgggacttcccagttcagaccctcccagcttgggtcctgcccacacgaagccgccccccatcgctgagcctgtggtgtgcgatggctcgcccaggccgcaaccagcccctcgccccagtaaaatgcagtcccagcccgggacacccggaaacctgtgtctgtggtcactgttgtgtccaccagtccccgcaggcacgggttgagtgcatggatgtccccgtctcacctcatctcgctgatttctgctcccccaccctcccagcgtgccccctaccagcccccattcccccgaaatccagctctcccaccaaagcctcagacgagctatccgtgcacaagcccctccctcctccgaactgaacctccgtcctgcgtcctgccccgtgtcttctccaaacgcaagcctggccatctcggatccccagaatatggagtgtgccccccattcagagccgttttacccctactcaaacctgtgacaccccctccccctcttccaccgtccagacctgtctccaccccacgtcctgagacccccgatatgcagatgttcagcctaaatctgttttgtcttttcccctgttttctccaccccaaactcatcctctggttcagggcgtctctctggttccgattcccccgccccgccccagtctaccgggcgatgacctcatgcctctccgtggtgaggcccccaccccaacctatgtgctttgaaggagggtgatttacctaagggaaaaccatccaccaaggacacacaccaccagcatgagggcagcctgcggggactttgaagtgaaggcggagtggtctctctcggggtgggggtggggatagaagctgacggcatcacctaggtttggtccccggagtggatgtgtcgggggccgtctgtcatgcggaattccgcgtgggcctcctcctgtgtcaggggcccgtgtgttttggcgacacccgattgtcatttccttcggaatcccaagtggaggcaggtgtgctggccactggccgctgcccggcgccttgagcagcgagcggagttgggttgcagagggttttgctaagggagcagacacttactcaaaggcaagcccggtgctttactggggaggggtatcttggcaaggtggtacccgccagtttgcccctgtgacttgcttcccaggtcaaatttcagaacctgtgccctggctgcaggcagtggtgggggtaggggttggggtggggctttggggtttggaggaggagtttctagaaacagacaagccggattggtcttcaaggtggggctacattgattttctttttttttttttttttttttgagatggagtttcgctctgggctgaagtccagtggcgcgatctcggctcaccgcaacctctgcctcccaggttcaagtgattctcctgcctcagcctcctgagtagctgggattacaggtgtgcgcaccacgcccggctatttttgtattttaagtagagacaggttttcaccatgttggccaggctggtctccaactcctgacctcaggcgatctgcccgcctcgaggcctcccaaagtgctgtgattacaggcgtgcgccaccgcgctcggccttacgttgattttcaaaccacttactgtttaatggggtttctggtagaggggttttgtagactgagaacttctgggtttgggagtcccagaatggaattggttctgaggaccttttgcttggtgtcatttagaggggagaggatggaaagtctgtgtgtgtagggccgctcccggggactccaggcagaggtgaagatccaggggcttggtcttctaggaactcagcgctgtcactcctttctcctggcgcaaagctctccactgcccaattctgtccccaggggacatttggcagtatttgagccaggcatgctgctcagtgcccccactgtgcccagaacggcccagtacagaaagcagcctgtccccaatgtctggactgtgagccccgtgagggcagtgagtgtgcctgcctggtccccgctccgcctccggcctgctcagtgccctgggctgtgtgcttgcccacagcgggccccctgttggcactgccacagggacctgggcacctaccagcaggaaagggagtgtttgacctcatctctcttctgcccccgacacctccctgtggtcaccagtgacctgctcgtcaactccgcttgtcactgccttgcccacatgtcactgttcttcccagccactggactcagcacagagccagagccccttcctgggccacttatgttctcgtccagggacgttcatgtccccagtggccccaggtccctgtgtgcgttggcaggtgactgccttcctctgcctcagtgtcctcattcatggatgggatgaggggcacacaagcagcctgcctggccgcgcctcattcagtcactcagccgccactgaccacgaatgacacaccgcccccacaacggtgaacacccccactctctcttggcttcctactccgtctggttcttccttcaggcttcttcactggcccttctttctttatttaatttttgctcgtagtagctttatttggatacacttctcctgccgcacgattcactgctttagagcgtgcagttccctggtttttatatgttcacaggctcgggccgccatcacctctgcccaattctggagcattctcattccctcaggaagaaaccagccttgaccccatcagccgccaccacctgtctcccctgcctctgtggctgggcctgtcccggacatttcatagaaatggaatcccacattgtgtggccttttgtgtctggcatctctcactgagtgtgatgtcctcaaggtgcgtctaggctgtggcctgagtcagagccctgctctttgtcgtggctgagtcatgttccgtgatgtggaggcaccgggttttgtgcgtctccttattcagtggacgttggtgctgtttccagtgtctgcctgttgtgagttgagctgctgcgaagaggcaggcgctggtggttgtgtggcgaccgtccttgttgctctgtgactgaggcgctggtgcctccactcgccggctgatcgtgtctgatggtgtcaaccccatgcaaccaccgtgagcccagctctagagacctgccttccaacctttccaccttgtcctcctgcccccagcatgtcccttccaccccagccttcccaaattgctgcacggttctgatttttttcttttttctttttcctttttgagatggagtctcactttgttacctaggctggagtgcagtggcgcaatcacaactcactgcagcctcgaccttccagcctcaggtaatctgcccacctcagtctcccgagtagctgggactccaggcgcgccaccatacctggctaatgtttgtattttctgtagagacggggttttaccatgttgctcaggctggccttgaagtcctgggctcaagtgatcctcctgccctggcctcccaaagctctgggattactggcggagccagcatgcccggccacactgctgggttctggagagcggcaggccgttcagattcctgtgctgttttgcacacattcccttctgttgtgaatcttcctctctcccagatcagatttggcctgggaacctctatattctcatccccaccagcctgcaggccactgggtcggtggtggaaggatgatgggagcagagagagggtgggcagtgggcatctgtctgctttcaccggagggctgaggagtgtgggaggccagtgctggtctgtttgccctggagagcaactcttccacttaaggatccccctcaggatccccctcatccatgcattccccacctgggtgactccgcccccacaggcactgggcaacacctcgggacatctgtgcattgtcacaactggggggcgctcctggcatggagtgagtggaggccagtgatgctgctcagcgccccgcagagcccaggactccccgccatagacagcgttccggcccaaatgtccgcagcgctgaggttggggccctcgccatgaactccccggactgggtttctattgctaccgcctcacctcgcctgggacccgtgggtgggagctgcatgacacagacagagatgcagagatgtgcgggcctcgggaacctgatggcgctccatccgatcctgagagaccacaggcgtggtgccacgctgccttcctcctcacgtggggcactgcagccttttgtgctgccgcagacccaggtgtcttttaggtctgaaggtgtcatcaagtcagacagggctgtgggtactcggtggtaccaggaggctggagatgagcaacctcgggtcttttatctgcaggcaccatttggaagtgtggagagcagttctcacgggagtgggctggaggtgggagctgccccccacacagggaagagggtgagagctgctggccgagtagaccctggggatgcttctcatccactctagactgctattcactctagactgcctgccggctgggtacagaggctcacgcctggaatcgcagcactttgggaggcctcagcaggaggattgcttgagcccaggagtttgaaaccagcccgggcaacatagggagaccctgacccccatctctatattttaaaaacaagaagagaaaaataggctgcacacccagtgggggcagcagcttggctctgctttgcggcgcctgggtcagcacctagaacccacatggcacatggctggttggtggggaggcgtcggctggcaggtggcggcgtgagtaaatgaatgaatgacgtgcacggggtgtattcccggggcccaggcaccggcctccaacagtaactcgcctcgccatggctcacacgggcaccctggaaggcacgctgtcccctgccaagggtctgggccccacccttttttacttggctactcttggctgtgtctttgcgtttgtagaggtcagaggccgccagctcagcttgttcttctgcaggtgggggttgctccctgcagagatctctgtgcctcagtggtctctccgctaggccccggctctggttctggtccagagtccacctctcccctgtgtcagtccacccctgcaaccacggccacctgccccgggagccccatttctctgacgtcctccctcctctctgagactgatgggggcagcatgggaggagataagtgtcatggtctgtggacaggaggtcactggggcagcatcctggctgccaaggcaccgccatgcccaaggacgaaggagcagggagcagtctggggacctgcgtacccctgtcatgagtcccgggcccagccagcatccactgagcacctctggggccgtgtgtgcacctgtcatgagtcctgggcccagccagctctcaccaagcatcttctctgggtcatgccgggtgcctgctgcctcgtagacctcatgcctgatttcacagcttcctaggcaggcagtgttgtccctgcttaactgatgaagaaactgatgtcccaagaggtgaagctgcccaaagcttcgtggccaggaagggttgaagctgggactcagcctgggctgatcccgtcgaaagcccacactctttctgatggaccctgctagaaccttttcatgggacttggtttactttcatgggagggcacaaggagggttagcgataagggtgtctgggtgcttcgcccgccttgggtccctggagctgcagggctgagggccgcgtgtgctgggtggggtggtgctggtggggggctcacgtgctctgacaaggccatctatgcagctggcacggctgcccccttaatcacatcatgacaccgaggacatccaaatgtgacccgagagagccatctagagtcctcctctgaggagtggctgggaatgagattagtgggatgaggtgacgcttgtgaagccgtgcttcataaatgacactcctgggcgcagggcaggaggcaaacctccccagaaactcccagatccagtgagagcagacagcggatagctgggtgaccccccatttttttgtggggggtctttcttatctggtgcttctccctagccccgcagaggatggctggacatcacgcccaggcacccagcgcagtcccttgcctttcacatgaggagggggctctctgggagggcacctgggccagggcctcacaggtggtctggggacacctgggacccctcaggcaggagcactttgcaactttgcaggggttgggacctgtgagggctgttagccagcccaccccctggctctgtcaccgccatccagcaactttgcaggggtcgggacctgtgaggggctgtgtcccggcccacccccgagctctgtcaccaccatccagtgatccttagtcggaggcctcctgctggaaccactctgcggagactccagcaggaggcagtgccttgcagcttccccgtgggcagggctgggccgagtgctgagtctaggacacttcgcctcctggggcaagggccagggagtgggcacagagccagacccagactggctggattcacgtcccagctctaccctcaccaactgcatggggaccttgagcagagggtgctgtcccaggccccaagatgcaatggcgcctgcccacctgctgtcccaaggacattcagtcaagcacactgagtgcttccagctgtgccagctggtaggcacgggcaaggtttgcctctgtcctagccccatgtgtgttctgatgctctgcccctgggccaggagcccgcacgggatgtggcggcacccatgaggctctggtcggtgttccctcctcccttacctgctccacgtcccctgtgggtagcaagtgccgcctcacctgcaggctggagttacccttacccaaggcggtcctgccccagtgtccactgggccagggtggggggatgccctggtgtataccataggtggcacatccagaccatagtcagcctcaacacatgagtcataaaagatccgtcattgggatgtttcaattccttttgtccgttaaagagcctgaaaaaaatatgaaaacagtggggaccagttttcccagccaagcaaggcgttgcaggagtaggagcttggctgagcctccaggaaccagagtgctgtgttcctgaggaagatcccgcaccaggggagaccttgggggctttgcattggtgctgttcccaggccctgtctacacggcagacagcccctcacgctttgcgtccccactcagggacacctcaaagtcgagcctggagacaaatcgtgccgtgccattggcccccacaaacagtgcctcatcggctccctttcctcctctccccactggtgcagtggggatggggctggggatgcctggccacactctgcaggtctcgctcattcaagtcacttccctggttttgcccgagagcagggtctctgcccttgcaccctgtggacattggggccggatcgttctctggggtgcggccgtcctgggcactacagggtgctgagcagcgtccctggcctccacccactccacgccaggggcacccccagtcatgacaaccacagatgtccccagacatcaccatatatcataccctgggggcagaatcaccctggttaagaccccctgggttatgggattccatggacccccaagagactctgcgtcccatgatcctctgccctgctgaggtcccaggaggctgcacacattgaaatccataccctgagtgggagggagagaggaggtgaatctcaggagctggagtccccctggtttgtgctgtctgccccatcggaggcttattctggtgtctggtgtgagcaggggccgactccatttttttccacatatttatcccagggcgtctccctctgtacgggggccctgtcactgttttgtcaggtgactgggtcatgcccatttcccaggggaacaggaagaagctcgagactgaaggcttgcccggggcagtggcagaaggaggcctcctggctcttcattctggggcccagggggtgaaaggtggaccttccctatgagctggcccagggggtttgcaggacccacagggcagtgccctgccaaggggatggggcagcaggaagcccggtggcccagggcccgggtccaccacccagaccagggcaaccaagctgcaggtgtcggccacacaggcagagccacagcagcatccccactaggcacccccgggccagggacaagaacctctgcagggcctggcggagcacgagtcactcactgattcactgctgatgtgcagcgagggtccgggttgctgctaaactccctcgacccggtctgagcctttccacacggccacacacgttgtctgtgctcaggaattacttaacagcagcttaagatcctgatttctctctactctaaccttttacgatgaaaccttccgagcatccagcaaaggagggagaatgcggtggtgcccggtctcatccggagcctgcctggcccatctctgaccgtggtttgtttttttgaatacctcacagttcacgtgatacagaattctagaagtacaggccgggcgcggtggctcacgcttgtaatcccagcactttgggaggccgaggcgggcggatcacaaggtcaggagatcgaaaccatcctggctaatactgtgaaaccccgtctctactaaaaatacaaaaaattaggcactacagtggcgggcccctgtagtcccagctactcgggaggctgaggcaggagaatggtgtgaaccaggaggcggagcttgcagtgagcagagatcgcaccactgcagtccagcctgggtgacagagccagactccgtctctaaaaaaaaaaaaaaaaggaattcaagaagtacaaaacgaggtgccaggagaaataaggcttctttcctccccaatcctcgtcctctccttcctctccccacccaccccatgaccagccgcttttcgaaccttctgggagcagtgtgctctgcatggccatttttctgtgcagtgggtctcacagcctcttccgctccctgtctgatggcctcttgcgtcttccactctgactagctgccgcagtgactccatctctgcacacatgcatgctgagtttctaaggataaattcttagaagtagaaataccgcatcacagaggatgtgcattttttaaattttggaagcagttgccaaattgccttcctttgaagccgtagcagtttgcagcttctgccaaccatgagtgcgtgtggctgtctctccccacgcctgggatggtgaggccgagtcccccagcccacagcctcccccaccgtctgacgggcgggagggtggtgtcctcggttggattggcagctcctgactgcgagggaggactggtcctttcccagtgcggtttgttggtgtcctttgctactttgggctctcctgtgggtggcaggtgcttccctcagtttgtcatctgttttttaactgtgttggtggtgtgtctgccctgcggactcccaattttcccggtgttgaattccacagccatgcctcttatggctcctggattttgttcttcctgcagcgcagctgagcgaggggcttagaggggtcgctgggggtcccggagctgagctgagcaccgctagcagcaccgggcaagtgtccaggtgaggtgccccgggaggccccaggcccgggatacaggaccctccagatctcggaggtgggaagacagtctgcacacccgtcttgtgcacccctgccctcactgcagggacagacaggagctgggtctcaggctgctgggcaggcctgggccctgtggttttgcccaccagccttgggcagcgttgagtgagttgtgtggccagtagactgacagctgctgcccacctggcaacgtttgggccattggctcacggcgtctctgttgccccggagggcttgtcaggtgcagccatgtgctgctgggcagcgatgtgtgccaggggccgtgtgcagctgcagctggcgcccggtgtatttgctttcagtgctgacttcagggcagcatcagtgttctggggaagtgggggatgatattttagccaatcacaaccagactctgccagcaagtgcctcagtgcacgcggttaccaccgctgctgccagtgacacttgtttacattctctcattctggaaaaatgccagctgggcgcggtggctcacacctgtaaccccagcactctgggaggcagaggcaggcagattgcttgagcccagaagttcgagaccagcctgggcaacatgggaagcctccatctctacaaaaaatacaaaaagtggctgggtctggtggagtacacctgtggtcgcagctcctccagaggctgaggcaggaggatcacttgagtctaggaggcaaaggctgcagtaagccataattgcaccactgctctccagcctaggtgacagagtgagacccggtctcaaaaataaaaatcctggctgggcgctgtggctcacacctgtaatcccagcactttgggaagctgaggcgtgtggatcacctgaggtcaggagttcaagactagcctgaccaacatgatgaaaccccctctctactaaaaatacaaaaaaatagctgggtgtggtggtgagtgcctgtaatcccagctacttgagaagctgaggcaggagaattgcttgaacccgggaggcagaggttgcagtgtgccgagattgcaccactgcactccagcctgggcaaaaagagtgagactctatctcagaaaaataaatgaataaaaattttaaaaagataaaaactccagggcgctcctgtttgtccacacttaggtctctggaaatgaattgcatcaccaaggtctctgtgtgaaacaagataaacaaaaaagggtcatctgaaatgctgtgatttgtaactaaacaaagttctttttttttttttttccttcctgagacagtgtcttgcactgttgcccaggctggagtgcagtggtgcgatctcagctcactgcagcctccacctcagcctcctgagtcctgggactacagatgtatgccaccacacccagctaactgtttctttctttttttttttttttttttttgagacagagtctcactgtgtcacccaggctggagtgcagtggcacgatctctgctcactgcaacctccgccttccaggttcaagtgattcacctgcctcagcctccctagtagctaggattacaagcatatgccaccatgcccagctaatttttattttttagtagagacgaggtttcaccatgttggccaggctggtgtcgaactcctgagctcaggtgatctgtccacctcagccccccacagtgcctctgtttgtattttttgtagaaacggggtctcgccatgttggctgatctcaaactcctggtatcctcctgctgtacctggcagctaagttctttaacgagtaagatttgcattacaaagtttttccattgttggagaaggcctagccaagggtgctgaaagtacagaagccacaaaggctcccaccaggacacgggaagggctgggccccacctgcaaagtcagatctggagcaggggcagtgctggcatggaatacagtcctggagccgttccgcttgtgcccgcgctcctgtgcccatgggtccctctgcgaggtgccaggtcttggggagactgtcctgtgctgggatttgaagtctgctggtgccgttgtccatcttgcttttactttggcagctagttgttgggggccacttttacaaatgtacttcctttagcaggcatggtggtgcatgtctctggtcctagctactcagaaggctgaggtaggaagatagctggagcccaggaggtggaggctgcagtgaaccatgatcaaactactgcattccagcctgggcgacagagcgagagaccctgtctccataaaaaaaagtgtttcctggcagcacatgccaccacctggaatgcttctccaccagcttgattttctcccactacctcctctggtagggagctcactccagtgggtgggtggggctgtggccctgtcattgggagggctctgttcatgtgtgttggtcaatgaatgaccctccccaccacatccaacacaggatggggctgtcagaagtcaggggccgtgggggcacagagaggaaagagagagggcagggccccccatgcgaggctgggcagagagagggcctccaggaccgtggggagcataagtgtctggggaagccccgtccacacctgccaccctctgaaacattcagtcacacctgcagagtccctgctgccctgcaaggtggcctaggcacaggtcctggggtcaggaccctacgcccctggcagtccggatcgtctctgccctgcggcagccgcgtctacgtggtgagtcgcctgctggctgcatggggcttgtgaagccgccagtgctgggcgacctgcatggagccgacggtggtggctgatctaccccaaggagggcggagggctggcctccctctggtctcagatttgctggacttgaacaagttcctcgccgcttggctctgggactcttggagtctgagcaggggctccctcacccctgctctgaagctcagtgttcgggtcctgcctggtttttggtgtgccaaggggtacaagctactgtctgggcaatgctgcctgtgaagccgatgtttccagctgtcctccccaaccatggccacagctgacgtcctctgtggctgcacgcaccacctctgcacagcctggactgagcactgcacttccgacggagactcccccaggagcccctgcccccagggtggggttttcatgccacagtactgcctttgcaagtggtctctgctccgcggtttcctttctgtaagtgctggaggatctgtgtagatcccccttcatctgtgaatcggtcccggggggccccacacccacagctctcctggggctcaggatctgcatagattccctgttcatctgcagatcagtcccggggggccccacacccacagctctcgtggggctcaggatctgcgtagattccctgttcatctgcaaatcagtcccggggggccccacacccacacctttcctggggctcaggtctctatagaccctctggctccaggctcgggaaattgtcccccagaggctgtcttcactggggacagatgcttaggcctctcctcgtcctgggatggccagtgctggcccaggagtggtcgggtgtggtggggacacatgggcctttggggctgcgggaggcagctgtgccctgtggagaaccggtggggactgtgggtggggagaggccattctgggcgagggagaaggggatggggaggaggctggtgacatgacctggccccagtagggggcaggctggaaggagggagagctgctggccattgctctgtggccgcgtgggccaccctttgggcccatgtgctttgggctgagccatgtagagaaccctgggccttctatgtggtcgtgggcattgctgccctgcactctgccttcgtgtcctcatctgcacaggcggtgggcgctggcacccgtccatgaggccttgcagaggggacacgagataagccacgaaaacccactaccacaggactgtgggctgcatgctcttgtccctcagagcctgactggccccatgtggccgagccagggaccacatgcgtcccttgactgcgggcccagtcagcgctgcctgcgggctcttgcagaagaaacagccctgcggttgatcctatctccaaccccaggccgggagctcgtcagaggccacctggagctgtggaggtggcaatcaggccaaccgcctcagtatctcaggacagagtggtgctcgggatgacaggagcagcaccaaacccgcatgggtctgtccctacctggtgacgcaagccagtgcatgcctcaggtgtctgtttcctaaaaaggcaggtgtcgcctcggcccttctggtctccgtgagtcagcctcctccagggccctcccaggtcttttgtgtctggtgtctctcacagggtgcaacgtcctcagggcgtgtccgcgctgtggcctgggtagagccttgctcctttcatggctgggtcgtgttctggcgtgtggagggccgcgctggttcgtccctcacctgttgatgcgtatgtaggattttgccgtcttttggctgttgtgaattgtgcgtctgtgagcatttgtgtaccagttcctgtgcctttcccattctcctgggtgtgtatctaggaagtgctgggtcatgtggtgactgtgggtttctcttgcgtagacataactttatcatcacttaacattagtagcagaacgggactaagctttcatcactgacagactctgtgtttaacgattgaggaacttacctgccaaagaagtcaccagggactggggagagggatggggagtgagtgttccatggcgacagagtttcagtttgggaagatgagaaagttctagagatgaccgtggtggtggctacacaaccacgggaatgtgattaacaccactgaactgtacgctttttttttttttgagacagagtcccgctctgtcacccaggcaggagtgcagcggcacgatctcagctcactgcagccttcacctcccgggttcaagcgctcctcctgcctcagcctcctgagtagctgggattacaggcatgtgccatcacacccagctaatttttgtatttttagtagagacggggtttcaccacgttggccaggctggtctcaaattcctgacctcgtgatccacccgcctcggcctcccgaactgttgggattacaggcgtgagccaccgtgcctggccagaactgcacacttaaacgtgttcgagatggtaaactttaggtaaattttttcactttttttttttttttttcttgagacagagtcttgctctgtcacccaggctggagtgtagtggcatgatcatagcttactgcagcctcaaactcccagcctcaggcgatcctcccacctcagcctcccaagtagctgggaccacaggtgcgcgccaccacacttgagcccaggaggttgaggctgcagtgatccgtgattgtgccatggcactacagcctgggtgacacagggagacctgtctacaaaaagaaccgctgtatttacagaccggcagcctgtacatggccttgggctgtggtttgctggccctggtgggaagagcgtttttcctaggctaccttctgtctccatggcctgcacggaccttcactttattcttgtacaaacccccttcctgcctcgggctgtgcatctctctctggaacgttctttgcggtctcctcaccgccacttttcttcacacctcaacataaatgccacccccttggaggggccttcctggtttggctgagcctggtcccatgtgggctctgcatgggcccctggatgttaccttggttgtagctgagtgcggatgtggcttgtccacaggaggctgatgtccctggagctgtgacttggtctacctgggcctggacccacgtggccggcccggggcctgtgcgtggccagctcttgcacactgccttagagctggtgtggcttgttgaaccccgttgcagacgcacacgcacgtgggtccccatggctcctcgggacatggaggctgcccacgctcagggaagagtccttgtcgggacctccaggactcttcccagcccccgcctccctcctggggcctccagggcagaaagcccctttcccgggcaggaggacagggtgtggatatacaggctgggagggtctgtgggcagcagccgaggcccaggttgggggagcctcacctaggatgaggctagggctggcagaagatccccacagaggagccaggaggaccccacagtcactctagctcccagggcctggaggtgcaggcgagccccgtggtctccgggcagccggccctgccccactcacctctcctgcccttcccgctgcaggctaaccttgccgcgggccgagccctgcctcgccatggaccaggactatgagcggcgcctgcttcgccagatcgtcatccagaatgagaacacgatgccacgcgtgagtgcccccgccctgcccaccactgtggctccccctcccccagctgcctctgccctggccagcagcctcaggtgtccccactgtcactaaagccccacggaccactcaggtcccagtcccccaggtcacacggggcctccgcctcctgggctgtcagggttgccgccacccccagggccatagtcagagcccagcggggcttggatggatgaggaggcaaaaggcccagagtggtggagctggggcggccgcatgggcagaggcacagggtggcctgcagagcctttagggagacccgttcctgtctccaagccccaggcacatctggaaccctgtgggatttggggggccctggctttgtccttccttgcgctccaccctgcctccccagcccagccgtgtttgccttgccctgggctccaggcaggccactggccacacagggtctcggggctggtggctgctgtgtgacagccacatccctcacctgcttccccacccgactcctgcggggggctgaggggccaaactcctgttgctgtctacacaacatgaagcctgggtcggaatagcatcaggcttagcctggacggccaccagtccctgccctgtgatagacgcccaagccatcattctcgaagacgaagttgccattgtcccgagtccctcccccatgggctggcctgcatagacgggtctgaggggcatgggcctttggggaggggctgtcccatcgcagctccctcagtgccagcaacctctgtgcccaggcattgggctaggcctggggcaggctcaccttcaaggctttgttcagcttcagaccccaaagcctgggtcccgggacctgcgggagcccaccacagccgccttctccccctgtgcggtgcggcccccacagggcagagccagggaggcagatccaggatcgtgcgtgatgtagcagggtccccattggtaaagggacagggccactgcagaagaaaagtggcgtagaattagaggtgtctttgcaatctcagggatttcagagagagagaggcataaatacaggggcatctgtgtgcacagagaggatctgggcaccacggcgcccagcagcaggagcagccctagtgccgaccctcggtctccagagcactctcggggctgccaggaggacagtgggagcctgcaggcccagcagtgcgtgggagggcggggcgcagtgcgaggatccagcaccctccatccagtgcacttcgaagtctcccggatgcagccaggccggggtgtgaacgggagatgggggaggagcgggcattggcagttttgggagagctccccacatacccgtcctgccccgcagtcacccagcacagcctggactttatgacacagaaccaccttcagacccagacggagcgccaggctgtggagagacagccctggaaccctccaaagtgtcaaggccatgactgcgtcacaggctgggggcagggagatgtgacagcagacggaatatgaccctacgcaagcctgtgtttcctggggctccaccagagaggccgcagacggggcccacgcagcactcgcagaacctctcccagtcctgggggtccggagtcggaggtcacggtgtgggcagggccacgcttcctctcgaggctccaggggaggacccttcctgcctctcccagcttctgggggctcctgctatccgtggctgtgaccacgtccctctggcctctgcatctgtcctggaaccatctgcttgtgtctctgtgtccgtgttttcctcttcttatgaggatgcttgtcatcaaatcagggctcaccctaatggcttcctcttgagtataatcacatctgcaagaaactcgtgtccaatcagagtcccattcccaggttgcggggctcaggacttcacagtatccttttagggacaccggtcagctgataacagacccctcatagaaaaaagacggcgcggggacagtcagatggggttggagggttagacgggtgttgtgggcagcaggagatggggatgagggccacactcccaggtggctctgggtacagctgttgcgtgtcttgtgccgtcaaggcctgcgtctgtgatcatctagagacggtgaatgcatggcacctgcgcagcgttgggagggcagttggggtcttgtgctccctggctctgtcccctccgccatggcccccattcctgccactccaccccgtcccgtggccctgccctcaccaccctcctgcctggcagcgttgggaggctgagcctgcccgtgggcctggcatctcccggaggcttctggcacagaaatccctgaccatgagtgaccacgagtgactgtgtggctcccctccttgggttttcttttttttttttttttttttttttttttgagacggagtctcgctctgtcgcccaggctggagtgcagtggcacaatcttggctcactgcaagctccgcctcccaggttcatgccattctcctgcctcagcctcccgagtagctgggactacaggcgcctgccaccacgcccggctgattttttgtatttttagtagagacgaggtttcacagtgttagccaggatggtcttgatctcctgacctcgtgatccgcccgcctcggcctcccaaagtgctgggattacgggcgtgagccaccgcgcctggcccaccccttgggttttcaagatcaaagccccctttgctcagtggccagaggctgagagaggctggcctgggggcactctcggggggctctcggtgctgagagcaagccctctgctgatgcccttcaggtcacagagatgcggcggaccctgacgcctgccagctccccagtgtcctcgcccagcaagcacggagaccgcttcatcccctccagagccggagccaactggagcgtgaacttccacaggattaacgtgaggggctggctgggcaggagatgggaccccccgggaagcccagggcccctcccagcctccttgctctagggccgggaacaagcgggctcctcgacccctccctctctgctctcctgcctgcaggagaatgagaagtctcccagtcagaaccggaaagccaaggacgccacctcagacaacggcaaaggttagggtcccagcccatccgccctgcaggcccccaccctgccttgccccgcctcactgtgcttggtgcccgcagacggcctggcctactctgccctgctcaagaatgagctgctgggtgccggcatcgagaaggtgcaggacccgcagactgaggaccgcaggctgcagccctccacgcctgagaagaagggtctgttcacggtaagcctgcggcaccccccacccgggagctggctcccagtgcagcctccccggccccccacctcccaggcaccagctctgcctccccgagcccggttctcgggcccagccacggctcagcacccccgccctgaccctgttccttagccaggtcaggggccctgggatctgaggctggaggtctagcaggtaaactgggatgtgggggtgcgggaggaatccaggctcagcctgttgggctttttctccccacaccaatgctacctggggtcccgaacacccaagccggtgggggtcctgcccgtagggggcagtactgggtcctcccacagggccccactctgtccacatgatccgggagctcaaaggcaggatcacacggagcctggcttgggtccctcgagagagggcgggaggggtggggggtccgcagtccccgccaggaaggcgcctgcctttttacagctgctccacacagggtctcagcacctgccttagggctatgagctgtaccgggagcgtgggctgctggggggctctgagggtcctgcggcctgggcgtgcgctcagctggcatgtcccccgctccacagtattcccttagcaccaagcgctccagccccgatgacggcaacgatgtgtctccctactccctgtctcccgtcagcaacaagaggtgggtcccagcttcctccgcagccctccctactccctgtctcccgtcagcagcaagaggtgggtcccagcttcctccgcagccctgtccctgcgggtcctggtgggcgaggctgaagggggcttcccagggcatagtggcctggagctgtgactgtgtcctcccccagagtccttagagtggaggggccccagccccccatgaggccatggtcagtaatagaagtgtagtccaggcctagagcagcccagagatccccttgctgagggcacaccatggcctggcagtgttggcctcagacaaggggcagggtagtcaggaagggctgcctggaggaggtgtggggagcagagccagcacagctgtggaagggaggccagggcagccagacacccgagggtgaaggcctgtggggctgtccctgggtttaggatcacatggtggcggtggtgattggaggggccggactgggctcctggggctggcagggaaggagacacttcccaagcgtttgcaagaggtgacccaagtgccgtggctcacggatgccacgtggccgcctctgcagccagaagctgctccggtccccccggaaacccacccgcaagatctccaagatccccttcaaggtgctggacgcgcccgagctgcaggacgacttctacctcaatctggtggactggtcgtccctcaatgtgctcagcgtggggctaggcacctgcgtgtacctgtggagtgcctgtaccagccaggtgggtgctgcgtggggtgtgcatgtgcatgggggcctccccagctcccagcagacctcaatgtacccaccgggatccagggagcatcagtacgagccaggcgcctgccatggccctcctagctggggcctcccagcctcccagccacagccctcccagccactaccctcccagccctcccagccatggccctcccagtcagggcctcccagccacggccctcccaaccctcccagccatggccctcccagccactgccctcccagccagcagtggcatctgcggcagcatggggtccccactggagccacaatctctgttcagctctatagagaagaagagacaggtgtcccagcctggctgagcccaggggccactatgaccaccgagtggccgctgtcctggagtggcctctgggcgcatggagcctgctagtccctacagggagactgggttgctggtgcagggcagcagcagacactgcccgctggggtgggggtttcagggataacgccatgcgagtagtttcgggagagcgagggttggcgccctccctgcagcctatgagctgctcccgctggcagtgtcccacacccttctaggccctgccctcaccatttgagcgtcctctcccggcagcaggagccgtgtagctctgggcagcttcctcccatcctctgctcgtcccatgcaggctctcccctgtgtgtgtgtgtctcccctgtatgtgtgtggcaggcttgagcttgccaggtcccagcagtgaccaacccagcgaccccatgggcctggagtgatgagagagtgaatgagtggatgggagagtggatgggagagtggatgggagaatggatgagagagtggatgggtgagcggatgagagagtggatgggtgagcagattagggagtggatgggtgagtggatgggagagtgggtgggtgtgtggatgggtgcgtggatgggtgcgtggatgggagagtggatgggtacgtggatgggtgagtggatgggagaatggatgagagagtggatgggtgagtggatgagagagtggatgggaaagtggatgagagtggttgaggggagtggatgtttgagtggatgggagagtgtatgggagtggatgggagagcggatgggtgagtggatgggagagcagatggttgagcggatggatgagcagatgggagagtggatgagagtagttgaggaagtggatgggtgagaggatgggagtgcggatgcttgagcggatgggagagcggatgggagagcagacggttgagcggatgggagagcggatgggagagcggatgggagagcggatgggagagcggatgggagagcggttgggagagcggttgggagagcggatgggagagcggatgagagagtggatggttgagcggatgggagagcggatgagagtggttgagggagtggatgggagagtggatgagagtggttgaggaagtggatggttgagtggatgggagagcggatgggagagtggatgagagtggttgagggagtggatgggagagcggatgggagagcagatgggagagcagatgggtgagcggatgggagagcagatgggagagtggatgagagtggttgagggagtggctggttgagtggatgggagagcagatgggagagcagatgggagagcagatgggtgagcggatgggagagcagatgggagagtggatgagagtggttgagggagtggctggttgagtggatgggagagcggatgggtgagtggatgagagtggttgagggagtggatggttgagcagatgggagagcggatgggtgagcagatgggagagcggatgggtgagtggatgagagtggttgagggagtggatggttgagcggatgggagagcggatgggagagtggatgggagagtggatgggtgagcgcatgggagcgcatgggtgagcggatgcgagagtggatgagagtggttgagggagtggatggttgagtggatgggtgagcggatgggtgagcgggtgggtgagcgggtgggtgagcgggtgggtgagcgggtgggagagcggatgggagagtggttgagggagcggatgggtgagcggatgggagagcgcatgggtgagcagatgcaagagtggatgagagtggttgagggagtggatggttgagtggatgggagagcagatgggtgagtggatgggagagtggatgggtgagcggatgggagagcagatgggtgagcggatgggagagcggatgggagagtggatgagagtggttgagggagcggatgggtgagcggatgggagagcgcatgggtgagcagatgcaagagtggatgagagtggttgagggagtggatggttgagcggatgggagagcagatgggagagtggatgggtgagcggatgggagagcagatgggtgagcggatgggagagcggatgggagagcggatgggagagcgcaggggagagcggaggagagagcggaggagagtggttgagggagtggatggttgagcagaagggagagcggatgggagagcggatgggtgagcagatgggtgagcggatgggagagcgcatgggagagcgcatgggagagcggatgggagagcgcatgggagagcgcatggatgagcgcatgggagagcgcatgggtgagcggatgcaagagtggatgagagtggttgagggagtggatggttgagtagatgggagagcagatgggagagtggatgagagtggatgggaaagcggatgagagtggttgagggagtggatgggagagcagatgggtgagtggatggaaaagtggatgggactgtggatgggagagtggatgagattggatgggagagtggatgagagtggatgggtgagacagtggagggatgaatgtacccatggatagactggggcttcgagaccagcggcaaagctcacactgacctctgcctccaggtgacgcggctctgtgacctctcagtggaaggggactcagtgacctccgtgggctggtctgagcgggtgagtgcagagggcttggcccccacctgggagatctgatggggctcttgacagtgttgggggccttgaagacccagagggtctagtgcgtggcctgaggtcgcctgtgtccaagcataggtctgtgtcccccactgtccccggccttagtgtggtcctggtagagggagtaacagggatgagcaggcacccaccaggcccctagaaaggatggcaggtccagtggggaaataacgccccagttccttccatgggacctgcccacctgggactcgctcccctggagttccattttccactcagggtcgagtgggctttagttccattttagattatgatgaaaacatctcagcagcagctttgaagcatatcatggggagggtctgtgcccctcacccagagctgcccagggctgcccctagcactcgtaaccgctcactgtgtccaggcgtgtgcgctcaccctccctccatccatcttaggttttcatgtgcctcaaagtcagttgcagacagcaacgcatgttgcccagctcctgggcctgtgtggaacctggagctcagtgtctgcagtttctccttccctctgtgtgaaatgtccatgtgggaaggtccacgtaccgagtcttggctggactctgagaaacccaggcgcagtgtgtgcggggtgtgcccgccaccccagcatgcactgaggggggtttatgcttcttccgaagggacgtgcattcgagagtcgttagggaaaccgtcccagagccctggtgaggagagagcctggcgcgaccaacgccaggacgggcacagtccccgggccagacctgacaccggtgctctgcccatgccttccatcctaggggaacctggtggcggtgggcacacacaagggcttcgtgcagatctgggacgcagccgcagggaagaagctgtccatgttggagggccacacggcacgcgtcggtgaggagcccgggtcccatggctggtgagctccctgaggccccagctccgcgagggcaggagaggctcacccccgcttccacctggcctccaggggcgctggcctggaatgctgagcagctgtcgtccgggagccgcgaccgcatgatcctgcagagggacatccgcaccccgccactgcagtcggagcggcggctgcagggccaccggcaggaggtgtgcgggctcaagtggtccacagaccaccagctcctcgcctcggggggcaacgacaacaaggtacccccgcccagagcctgggcttccccttcaccagaagccgcacccctcacactggcaggaacggaagagcctgggctggggcgggcgcgggcgcggggcccactccacagccatcagcagggcaccaggcttgtccttcctgctcagccagtcctgccctgtggcacagggtgacgagtgtgtgcccccaggggtccttgagggagcagcaggaggagtgtggggtggggtgccagggcaggtcgtcacacctgtgaggaccggcctatgggaccacagggctgggacagccccggcctcacagcccctgtcccccagctgctggtctggaatcactcgagcctgagccccgtgcagcagtacacggagcacctggcggccgtgaaggccatcgcctggtccccacatcagcacgggctgctggcctcggggggcggcacagctgaccgctgtatccgcttctggaacacgctgacaggacaaccactgcagtgtatcgacacgggctcccaagtgtgcaatctggcctggtccaagcacgccaacgagctggtgagcacgggcggcccggcctcccaccaggcctcaggatgtgcgtcctgctggccccttacctgccacctgagagcagcctgtggggagatgggtcagagtcgctctgaagggagatgggcgagggaggccgagcggggaggcagggagttgtggggggcaaggcccctgggcctcatcagggcctcacctggggcaagacttggggcctctgggcccccatcgcagccacacctggcggctctgtgaggagccggggagctcctatggctgcctctgcttagaggggaggcccaggatgaagcgggctccactgagcaccctggcctgctccagccactccgggcgtgtcaccaggacagtctcgggggtgacttgcaggtggggcagaggggctgtgggccccgtttgggtccttgttgggctccagcctttggcggtgggtggaggggtccacctgtggcctccacacctcctagacagactcaggtggcagagccacatcccagcatcccctgctcctcctgggctggctggcggctctgagctctcacatgggctcaggcgggtgcatgtgaggcagcaggcatagcacccggcctcgttgcccctcaccgaccgcagcgccccctccgccctccaggtgagcacgcacggctactcacagaaccagatccttgtctggaagtacccctccctgacccaggtggccaagctgaccgggcactcctaccgcgtgctgtacctggtgagttcacgccaggcacttcaaggtgccccgggattctggacaaactgccatggccaccccagagcaccctgtcctgtgttcttagggaggatggtgtgcagatctaaaaccccgtgggacccagcagcaggggccggcagggcatctggtgctggttgtgttgccagcgttggaatgggctctaccgaactccccagccctgcaggtgcaggccctgtcctcctggaggaccttagcttcttcatttgtttattttccccataaagaggggtgaagaggaaagccaaaaccaactcacagctgaccactcagatgaccctgtgaacgtcctacacagtaactgtatgcacgtggctggatgggggccaggaggcgtccttggccccacgtgccctcacttgccaagattttgtttcttccctgaaaaacatgttctgtgctttcatccgcgcatctgacagtccctcatctgtgcagagttgatgagcccctcttgcaagggggcgtcctttgtgtttttgcaaaaatgctccaaccttggctaggtgcggtggctcacgcctgtaatccctgcacttcaggaagccagggtgggaggatcgcttgagcccaggagttcaagaccagcctgggcaacatagcaagaccccatctctacaaaactttttttaaatgaggtgtggtggtgtgcacctgtagtcccagctactcaggaggctgagatgggaggatcacctgagcccaggaggtcaaggctgcagtaagccaggattgccccactgcacactccagcctgggtgacagagccagaccccgtcttaaaattaaaaaaaaaaaaaaaaaaaaggctccaaccttggtttctgcttgtggtggccccagcctgcccctccctcctggctccagagtctggggggcccagccacccgacaccttgctcccctctccttcagtcccccagcactgtcccgaggcacctagaggcccagagacatggggtgcttccctcctgtccacaggcaatgtcccctgatggggaggccatcgtcactggtgctggagacgagaccctgaggttctggaacgtctttagcaaaacccgttcgacaaaggtaaagtgggtcggtatcagcgccactcgcccccgccccagcctgtcccagggtcgtccctgtccccactgtcctcgggcgtaccctcctctgggttcccccacttccgagcttccctcacctcaaattctgggtcatgtgtcggggcagtgtggcaggccgaggctgaactggcacctcccagcccctcaggaccaagccccaaagccttggggaccctccaggcagcttcctccctgggcctgcggctcagcgcatctgccatccccatgtgtctgcaggagtctgtgtctgtgctcaacctcttcaccaggatccggtaaacctgccgggcaggaccgtgccacaccagctgtccagagtcggaggaccccagctcctcagcttgcatggactctgccttcccagcgcttgtcccccgaggaaggcggctgggcgggcggggagctgggcctggaggatcctggagtctcattaaatgcctgattgtgaaccatgtccaccagtatctggggtgggcacgtggtcggggaccctcagcagcaggggctctgtctcccttcccaaagggcgagaaccacattggacggtcccggctcagaccgtctgtactcagagcgacggatgccccctgggaccctcactgcctccgtctgttcatcacctgcccaccggagccgcatgctcttcctggaactgcccacgtctgcacagaacagaccaccagacgccagggctgattggtgggggcctgagaccccggttgcccattcatggctgcaccccaccatgtcaaacccaagaccagccccaaggccagaccaaggcatgtaggcctgggcaggtggctcggggccactggcggagccagcctgtggatccaagagacagtccccacctgggcttcacggcatccttgcagccacctctgctgtcactgctcgaagcagcagtctctctggaagcatctgtgtcatggccatcgcccggcggtcagtgggcttcagatgggcctgtgcatcctggccaagcgtcaccctcacactggaggaggatgtctgctctggacttatcaccccaggagaactgaacccggacctgctcactgccctggctggagaggagcacaacagatgccacgtcttcgtgcattcgccaacacgtgccctcacagggccagcgtcctccttccctgcgcaagacttgcgtcccccatgcctgctgggtggctgggtcctgtggaggccagcagcggtgtggcccccgcccccaggctgcctgtgtcttcacctgtcctgtccaccagcgccaacagccgtggggaagccaaggagacccaaggggtccaggaggtgggcgccctccatccttcgagaagcttcccaggctcctctgcttctctgtctcatgctcccaggctgcacagcaggcagggagggaggcaaggcaggggagtggggcctgagctgagcactgccccctcacccccccaccaccccttcccatttcatcggtggggacgtggagagggtggggcgggctggggttggagggtcccacccaccaccctgctgtgcttgggaacccccactccccactccccacatcccaacatcctggtgtctgtccccagtggggttggcgtgcatgtgtacatatgtatttgtgacttttctttggatttgttttgtgtttttgttgactagtcctggaaatgtttgaggctagacggggaggggccaggacccacccactgctcctgggggatgaggtcctggttttaaagccccgtcatttcaagcgggtcgatcttccacattcactggagagactctccccacctctgtctgggtggggcgcggacccctcactgtgcgcctgtgcagggggtgctggtgcacgtggcagtgtggatttccagtggtcacggtcttactgtttcaaggtttttaaataagaaaaccaaccctgccttcgcccatgcccgcccctgcccgcagttgccaaagagccgccttgtcgctgtgggcgtcagggcttggctggctcagtgcacaacccacagtggccttcagaggctcctcctgggactgggaaccgccgcagggccaggcggacggcgtgaggtttgtgttggggctggttctgcccatgctagggggtgggggagctcccaggacagaccagccttgtttctcatgtaatgcagtgacgctgtcattaaacacgtggattcatgtgtggccgggactggctggctctaggtccccggctcgggtggggtcacacggtcctgccctagagtccccatctggccctggagctgcagaagcagcttctgaggggcttcccaggcctgcatttcacagatggggagctcagccctcgaaggccgcagagacgcctcccaggcccgtctgccagggcgccggccacaatcctgcagggccaaggactggactccaggcaagtccctgcgctccagctggacggccctgttccagggaggaggtgctcggttgacaccatcagggagggagggtgggcactgctgggctgagttcacccccagggctggccagatggggccaggagggacagagcaaggggggtgaaggccgtggtgggagggtcccatgatgatgggccagggctcgtgtagaaatgggggaattggttccccatggcccaggacagctgagaggaggtggaggggccccaggggagtgtacgtcaggctttgcggggcacgggggccactcagcagcgctggggcaggtgcctctgctgtcagctccacccgacaggcagacgaaggccagtggggccatcgcttcctggggcgaccctggcagtggttgggagacgcccagatggagggggaggctgaccaagggccccgcagggcgggctgcaacttttctgttgatcctggaatgtagctggtgcagtgagagggaaagagaattgaaaaactcaggctgccataggttctgcgatgagaggtgcaggaggcaggagcctggcccagggggtgctggtgcctccccggggtctgggcggagagaacaggaggaatggctgggaagtggctgagggagccaggaggccggggggccgggggctgcaggggaggctgtgggggtcctggcagccaggaggccccaggtggttttgaggctcgctcttgcgcggtgcctgagaagagggtgaaggagctggggcaggccccatcctgggcattggagatgatgaaaccgagcagacctggcccatgtggagctggcatgggggacacagcccagagacagagaagcttatgaggaagtgaggaggtggcgtcacaagggtggggagggggccttggggaagggcggccttggatcagaggctcaccacaagcctggcatttcagccagggctggagaaggcagggacgcctgggtgagaggcaaagggcacagccatgcaaaggccctggggcaggacggcacctggtatgcgggaggaacagagtgaggagaggagggcagggcgtgcagggccttgtgggcctcagggaggacttgggcacctacgccgagggagtggagctcctgggtgcgtgtccagatgggaaaggcagggtcgtatctgtggggacctgacaagggcaggggaagcggagaccagggtgcaggctccgcccccacccaaggccgggcccagccagaggaggggcagggcagggcaggaggtttctggatgtttgttgggtttggtttggttttgttttgttttgtttattgtggtaaaatacaaaatctaccgtcttacagtgaggtggcgttcagtaccttcaccacgccgtgcagccatcccatctgattccagaacattctcatcacccagaaggcagccctgtccccattatgtcacctagtcacccccaggtccccctccccagtcccggcacccacgaatcctctccctgattctgtggattggtctgtcctggacatttcatagaagtgggatcacagcgtacccttctgtgtctggtgtctctcactgagcgtgacatcctcaaggtgcatccgcactgtggcctgggtcagagcttcgcacctccttgtggctgagtctcgttccagcacggtggcggcgccgtgctgatcccctcaccttcactgggtgttcggtgttctccgcctcgggctgtcacaaatcgtgctgctgtgagccactgcgtgcaggtctcatcctgggtgtattttacaaacggactggatgtgagtgggtgaggagtgaggagctggggtgacaggtgcctgcgaccccggccaggcactgcctcctgcgatcgaaggggcagggggagacagaagcccctcaagggggtgtggagatggagaagccagaccccaggtggggggtgcatagagctgggggctcagggccacggaccccacctggcagtggccctggccttgcccacccacactgtgtcacccccagttgttaaatactcagaacgactctccagcccttccctcgaggccacctcaccccgcagctgggaggagggagtggtcagcgtggttgccgagacactgggtggcctttatgctgtcaacggtggcctcagaggccttctggcaggagcccgggggatccaggcagacatgcaaaccctcaggcaagaggctgcacggccctgtatcccctcggggaccctcgaggccagcttcccagcaccgctgtacaggtgagcccctccctacaggtgagcccctcccagcccctccctccctccctccctgggtgtcaggttacatggtgtttggtttggggtcttgcacgtgtcactcgttattcctaaaaggctcatgtgtgtgacgtcccctccagctcttcctgttcccctccggccagtggccgctcactgtgggggctacagacctggagacaggccaagaacaaatgtgtctgcggccgtctccaaggactgcaaacgcactgggagcttcggccacagaaatgttcgccctctgaaatccaggcctgtgcggggctgggcccttctgtggctgagagagtctgtcccacacctcttgcagcccgtggtggctctgggcaaccccaggcactccttggcccccggtctctgcttctgtcttcacccggccttcctgtctgcgtccaagtttccctctccttataagggtgccaggcactggattcggggccatcctaacacggggtgacctcatcttagctgcatctgctaaaaccatttccaaacaaggccatgtcctgaggctctgggcagatgtgattttgggggtataccagtcaccccgatacagtgtctattatcaattgtttaaacaattatggaatactatgcagccatgaaaaagaagagtgaaagccctttgctccatttccaaggaaagaaattaaaccaagatggtggctgggcatggtggcccacacctgtaatcccagcactttggaaggctaagacaggaggatcacttgagcccaggagttcaagaccagcctgagcaacatagtgagacccatctcttttcttttttttttttttttttttttttgagacagtctcatactgttgcccaggctagggtgcagtggcgcaatcttggctcactgcaacttctgcctcccaggttctaggattcttccatctcaagccttctgagtagctaggactacaggtttgtgccacatgcccagctaatttttgtttttttttttggacggagtctcactcttgtcgcaagactggaacgcaatggtgcaatcttggctcactgcaacctccaactccctggttcgagcgattctcctgcctcagcctcccaagtagctgggattacaggcatgcgctaccatgcccagctaatttttgtatttttagtagagacggggtttcaccatgttggccaggatggtctcgatctcctgacctcatgatctgccctccttggcctcccaaagtgctgggattacaggcgtgaggcaccgcgcctagctgtgagaccccatctctataaaaaatttaaaaatcagccaggcagccaggcgcagtggctcacgcctgtaattccagcactttcggaggccgaggcaggcggatcacctgaagtcaggagttcgagaccagcctgaccaacatggtgaaaccccgtctctactaaaaatacaaaattagccgggaatggtggctcatgcctgtaatcccagctacttgggaggctgaggcaggagaatcacttgaacctcggaggcagaggttgcagtgagccgagatcgtgccactggacttcagcccagagcgaaactccatctcaaaaaaaaaaaaaaaaaatccaggcgcagtggctcacgcctgtaatccccacattttgggaggccgaggcgggtggatcacgaggtcaggagatcaagaccaacctggccaaggtagtgaaaccccatctgtactaaaagtacaaaaattagctggttgtggtggcgggcgcctgcaatcccagctactcgggaggctgaggcaggagaatcgcttgaacctgggaggcagaggttgcagtgagccgagatcaggccactgcactccagcctgggtgacagagcaagactctgtctcaaaaaaaaaaaaaaaaaatcaaccaggcatggcggcacgtgcctgtaatgccagctacttgggaggctgaggtaggaggatcgcttgagcctaggaggtcaaggctgcagtgagccgaaatcgtgccactgcattccagcctaggtgacaaagcaagactgtctcaaaaaaaaaaagagggtctcgctcggttgcccaggctggagtgcagtggaatgatctcagctcactgcaacctctgcctcctgggttctagcgattctcctgcctcagcctcctgagtagctgggattacaggcacccaccaccacgcccggctaatttttgtatttttagtagagacagtgtttcaccatgttggccaggctggtctcaaactcctgacctcatgatccgcctgcctcggcctcccacagtgctgggattacaggcatgagccaccgcacccagtgcaagaccctatttctattttttaaaaaaatggagatgcagtgaatgggctcccgcaagtgtgtaataacgggggtgagtgcatgtaccacctgctcctgggaggaaacaccagaaagtagtgagtggcaggtgggtacggggccgacagcaggggtgaggggctcatttctcattgaatattattctgtgctgttttgtttgtgttgagacagagtctcgctctctcacccaggctggagtgcagtgacgcaatctcggctcactgcaacctccgcctcccgggttcaagctaattctcctgcctcagcttcccgagtagctgggaccacaggtgtccatcaccacacctgactaatttttgtatttttagtagagacggggtttcaccatgttggtcaggctggtctcgaactcctgacctcaggtgatctacccaccttggcctcccaaagtgctgggattacaggcatgagccactgcgcccagacaattttgtgctgttttaattgtgttttaaaagctacatgtgtcttgcaattcatttcaaaagggtgaggttctcctgatcttgaaattgcctttctagtggaaaagccgagtctatgtggggtccctcaaacaggctctgtaactgaccaggctactcccatgttctgtgggcacctgggagtctagtcaggatttaagcagagttcctgccatgagagctggaaccgggctttccgtgcagggcagatgagattgttttgaaccctgctagactgtcttggggccagcaaccttgttttctgggatgacttccttgggacatattcccaagagcaaggtcaaagcataaaacatctttgagtctcttgtctttttgtttttgagacagagtctcactctgttgcccaggctggagtgcaagggcacgatctcagcttactgcaaactccacttcctgggttcaagcgattctcctgcctcagcctcctgagtagctgggattacaggtgccccccgcccccacaccatgcctggcttaattttcgtatttttagtagagatggggttttaccatgctggccaggctggtctcgaactcctgacctcaagtgatccacctgcctcagcctcccaaagtgctgggtttacaagcgtgagccacacacctggcctagtgggtcccccagtcttccctgggccatggcttagtgccagccccagaccacttcttcctggtgcacctccaggccaggggggcttcccagaggaagggacttgtgggtcttggaggctggacaaggactgtaggaatccaggagtagccagggcccttgtcctctcccctccctcttctccaggcaagaaaagctgagaacagaaaggtttagtgctgacttgggtgcttggggtgcgatgtgtggggagagggggagtcagcctctctcctcaagcacccactctggggtgaggggtacagggctgaaggacagactccaagtggcgagggagggagaccccacgccgtgggccaggcctctacatcatccaccctggcagacatcgcaaaggggtcaaagcactcgctgtagacatgggctcagtctctgccccctgcccaccctcagcgatgactacctgtccctggagggttcccgctggccaccagccatcaggcaggccacacgctggaagtacacgcccatgggacgggacgcagccggccagctgtggtacacaggcctgaccaactcggacgcctgggaagcctggtacaacctgccacgggccccggccagccccttccgcgaggcctacaaccgctggcacagctgctaccaacaccgtgagtgcagcatgccatcgggtgagtgcccccccccccgccctgggcagcgggcctgccagagggggacaggaatgaccgccagcccccgccccaccgcagcctacacccagcacctgcgggagaccgcctggcatgaccccatcgtccctgcccagtaccaggcccccagcacccggtgggggagcgcgctgtggaaagacaggccaatccggggcaaggaatacggtgaggctaggtgcagggtgggtccttgggaggccagggggacaaggccacctaggccagggtgaaactgcccggggcgatccaggagccccttgctggccaacggcgaggaggtgggggcacatggtgacccgagtcccacctacagtgctcaacaggaaccggtacggggtggagccactgtggagggcatcagactacgtgccctccctgtcggcaccccagcgcccgcccggcaccacccagaactaccgggagtgggtcctggaaccatactgcccctccacctgccagcggtccccgccttccctcacacccactccccgataaaggcatgctaccaggatgcacccactgtctctgcacccagatgagggggcactaacctagtcccaggggaccagaggctcgggacagaggcagacactgggctcgctggccgcccacaaccagggcagggctgagatgcccaggctacccctgcccagagcccccccgcaggcagacaggagccaggctgccgtcatctctttatttgctgccagcagagtccaccaagcctgccgggcagccctgctgcccaccacggtggggtccaggcccagcccaccaccccgtggctgtctcctccaggctccagccgtcctgagggggccctggcagtgtctggagacccccaggctggaggtgaggggtgaactggactgagctcagggttagggttcccccagacccttctgggattcctacttcctgttccctgccgagaggggcaccccaaatcctccagagggctgggatggattagagttgagaatgggacaccctcaaaacccagggggtccttgcaagtccctggcgggcatccctgctgccctcacccgaccccacccccgggagctgggtgaggatggagggtgggggtccagagaagagtgaggggcagtgggggcttttccccaaggccctggggggcatcctcgtgcgtccccacagttcccttgcacaggtgcaggaggctgtcaggagtcagggccgggcatcacggtcccctgcaagggaggggtggaaatggcattagagagtgtgggtcagtgtctggggagggaggggtgggccaggactcacagcgtcgcaggcgggtcggccacagcaggaggctacagagacacagggcagcggccacgcccacgccgcccgtcacagccaccatcgcccagtggtaaaagctcacgcaggccctgcagcagagctctgagctgtgggaggaggcgggggatgagtaggcaccgcgggtaccacccccccgccacccaagctgaacctgtgcctcccctcacccccgacagcggctccgtcctgtccaatccaggagctgggggccctgccactccctccctcctgtcccacacccaacagctcggccagtcctgtgggccctgcttccagcatccatgccaaatccaccatgtctccccttccctgtctcctcatggtccagccccagcatggcccgcctgcacccgccccggtcccaggctgcaacttctcccccagcagctgtcctcccggcagcaaccaccagagggcgtctgtgagcgcctgggtcagggcctgtccctcttctgcccacagctctctgtgagtcccactgtcctcagggtcaaatcccctaagtcctccccatggcccaccaggccctgcacgacctgccctcccctcctccctctactccagccacacaggcctcctccctgttcttccaacacaacatgccaggtgtggtcctgccccagggctttggcactacttgtccctccccattggcctggaatgctctgacatcctgcaggtgtcagggccacgtcacctcctccaagaagccctccctggcttcctgccctggctgtccaggtttctctgagcgttcacctttacacaccacccacgccggtaccaaccacatgttcacctctgtgactattaacacggctggctctgccccaggcccagaccggctgtggtttccaggccctgggcctctacaggcgtgaatgctgtgatgctgtggtctagaaccatccatgtctgaaccctgagttctgtgggtctgggttacacggactcggggctcccttccagctgggcccacccccgatatatttctgtacggtgtcttcagcactgcacacatggacccaacgtttgttgagtgaataaacgaagtgctcagtggaagaaaggaaaggtctcccctgcctatgactcccattggggcaggtgtctttggtccacagctggatgcccagacccagaacactgctggacacacagcaggcgcttaatcccctcttactgaacaaaagaatgaatgaacgaacagcggcactcacgggcaagggtgcaggctctggatggccatgactgccagcccattggccaccttatccaagaagctcatggagccgtacacgaacgctccgctgttctgtggagacacaggcgaggtggtcagcgtgcaccccgagatctaggacccggcctcccccaccccagcctggctaccagccctaccgtgtggggaccgatgaggtcggccgtcatggccagcgaggtgacgaggatggtggcacagccagcacccagcagcacagccgctgcgtacacggccacacccagtccctccgccagcgccacccaggcggcaaaggccaggatcaccaggaggcctgagaagtaggtcatctgcagggacagccccggggtcaggcccacaccactgggtgcccccaagcctggcgcttcaatccgccacccctacccccaaccccagcaaacaaggcatgagctggatggtccctaaggagccctggctctggccctggacacaacaccgaggctctgcagatcctccatgccagagctgtgctctctgtccacgccgtagcggctggagacgtgtggctattctgcctgagcgcaggtcagttacaacgaaagcaaacgacggactcggctcagtccccacggccacatttcaagccctcagtagctgcacagggtggacagaaagcgccagagctccatggctgcgagtgtataaactcgagacacagagaagccaggatcctagaattccttgttcccagatctggggctttttttttctggagacaagagtctcgctgtgtcgcccaggctggagtgcagtggtgtgatctcatctcactgcaagctccgcctcccgggttcacgccattctcctgcctcagcctcccgaatagctgggactacaggcacccgccaccaacgcccggctaattttgtttttgtatctttagtagagacggggtttcaccgtgttagccaggatggtctcgatctcctgacctcgtgatccgcccgcctcggcctcccaaagtgctgggattacaggcgtgagccaccgtgcccggcctagatctggggcttctacaaggcgggaactcggaggcctgagagcatccgaggatggaacccggagcgggtgggatctcggctgcagggcaccccatcctccgccccagctgtccccggtccccgcccactcacgttcctcccaatgcacttgttgatgggcttcatgaggaaggaggacaagaagccgctgaggtacatcaccaggggaatggtcgcgatgaacttctgcggaggcagagccaggcatgccgtgtcagtcatggctcgccaggctggggccgtcccatcccagcgtccccgccccaatctgctcaccttgggcaggtggagcgagtaggtgaggtacatggccatgtaggtctgggacaggttcacgatgagcctggtggtcatgtacagtatgcccacctgtgggcagaccgacagagggactggcaggggtcaggagggccttctccactcccaccagcagggggcaccggggccagggtgggcgccctgcagctggcatttgatccattggtagtgactgcccagtggggtgggccaggaagaggagagcagcacttgatgagtgacgtttgccctgggtgtgggctgcaccaggggccacgtgtgctctgcgtctggacgcagctgccccacagagcaaaggccctgtgggtgggagagaaggcccacgccagccccaccgtccccagcacgcacctggtagaaagccggctcccggagccagtgcttccagagcagcaggggctgggccgtggcaggggccaacaggggggtgtgctcgcctggctcctccgcatgcggccggcgcctctcccgggtgcccaggtggaatagcagtgagaacacggcgccgacacccaccaccagcagggacaggttctggggatgcagcagaagcagtcagtggtggcgggcccagcccccgcccctggctcgaggacttcaggcgacccacccggactccagctcacccggaacacgggcacgtcctggccccccagctggtcgctgatgctgatgtcttgggtgggctccacccgcgacgagccctgcaggtgcagcaggagccaggcggcgccgtagacggtgatgttggccaccacggtgaacgcatacctggcgggcaggcgggcagggactcaacaagacgccaggaacctgggtcacttcctccccacgtggctacgccgtcagagaggcctggggaacccctgactgacaggtgattccaaccactgccacactgggtggcctccaggaagcccgtgctggcctcagtttccccagcccgcacattacctaacgcgggaaagctgtgacctgcagctccacccttcgtgcccaggaccagggtacagtgactcggccaagcggagtccaggctacaacccaaaagtctgagaacccagagactcagaagccagaattcgagaattcttcttccccagatgctgggcggctaaagggcgagggctccctggtctagaaccatccaggccagcccctgcccacagcccggccaggcacagagtcccccggggggcctcagaatcctaccatgaatcagtctctctttctgaaagcgggaaccatgccacctccagaggccacgtgagcacagcaggaggtcagctggcaaagcaatggcacgtaggaagtgcctggggtctggccccggtcagatggggccctcaggggccctgggcattgggcaacctgtgtcgttagcgcctgcacctctgtcacatggccataatggggaactcaaatctgggggtggggaggagctggtgatacacaggcagatgtggagacagcggactcccccgacacgaaggcgctgtgaggaccctggctttgggcaccagctggggccgagtcctcctctgaaatacgcgggagagaagagttcccacctcccagctcacggggaggattaaagaagctgagattcatgttaagggcctataactatgccaggcacacggcaggtgctcaatgcatcatcctcgtaaccagaagaacctcttccagcgcctctagcaagttagtggataagccgggcacccgctgtacccaggtgtaatagaaagaattctaaggcagccccagagaggcctgcccatcccatcccctccccgtggcagcagcagctgtaagtccaccatggatgttactcccaggatgtagccagggctaagtggcattctatagcagagggaaagggacttcgcagtgtgttataaccaaggaccttggtcagctcgggtgtgtccacagggagattactggccaggcgcggtggctcacgcctgtaatctcagcactttgggaggctgaggcaggcagatcactgaggtcaggagttcgagaccagcctggccaagacggtgaaatcccatctctactaaaaatacaaaaattagccgggggtggtggcgggtgcctgtagtcccagctactcgggaggctgaggcaggagaaccgcttgaacccaggaggcagaggttgcagtgagccgagatggcgccactgcactccagcctgggtgacagagtgagactcttgtctcaaaaaaaaaaaaaaaaaaagccaggcacagtggctcacgcctgtaatcccagcactttgggaggccaaggcgggcagatcacctgaggtcaggcgttcaagaccagcctggccaacatggtacatggtgaaaccccgtgtctactaaaaatacaaaaaaaaaattagccgagatcgtgccactgcactccagcctggctgacagagcgagatcctgtcaagggagactacggtgtgtgagcctggccaagtcaggcaatcctttgggagagagggcttagggcttcctgggatcagagattctccctgctggcctcagaagcagcagccaccgtgatctccacaggtgcaagactacaacttctgccaccaaccacgtgagcatagaggagggaccgcccccagccttccataagacgctagccctgggcaaccccttgaatgcaggctcaagacagaccctgaagcccaacagccctctccccctagctcagccatgctggactcctgacccccagaaactgtgagaggagaaatgtgtgatggctgagtgtggtggctcatgcctgtaatcgcagcactttgggaggccaaggcaggaggatcgcttgagcccaagagttccagaccagcctgggcaatatagtgagaccctgtctctacaaaaactttttgttttttttttttgagacggaatctcgctctgtcgcccaggctggagtgcagtggcgctatcttggctcactgcaagctccacctcccgggttcacaccattctcctgcctcagcctcccgagtagctgggactacaggcgcccaccaccgcgcccggctaattttttgtatttttagtagagacgaggtttcacgtgttagcgaggatggtctcgatctcctgacctcgtgatctgcccacctcggcctcccaaagtgctgggattacaggtgtgagccatgcccagcctacaaaaactttaaaaaacagctgggtgtagtgacatactcctgtagtcccagctactcaggaggctgaggcaagagtatcacttgagcccaggaggttgaggctgcagtcagccgagatcaccccactgcactccagcctgggcaacagagtgagaccccctttcaaaaaaataaacatgaaagactgcctggtctcgagctgccgagtctgtggccgctcattatgcagtgccactgactgatacaccgagccggggcccaccctgcccgtgggggagggtgcccaggctcccacctgagtgccgtgagctccaccttctcatggtcgttggtgacgagctccgggatgaggctgaggtgggagatctgtgtggaggcccagccaaactggaagatcacgatgaacgggccgtagtagaggagggcagcccactcgggcgtggccgccccacagcccaggcaggggctgaagatgaaggggaaggacagcaggacgcagacggtgcctgtggaaggcagagtggtcagtcgcggggctgtcccgcaccagccagggctcccagggtgaggacatggagggaggagagagggaaactgaggcacagatggagacgccccccgcatgcacacagtcacgcaggagcgagggtctgcagtcggggtcccccaggcttatggcccctggtgacaaaaggggaatctgacaccaggtgcctgggctcagcctgcaagtcagaagaagccaggcgcagggggtcccccggaaacctgccccccacaggtgccccggttacagccgcagcctcccccagctcctccccctcggccactatcaagcctcccatagggcctcggggagcgggaggcccaggtgggcctgggctggacccctccttaagctccgccatcctcatcagctcctaaggtgaccactccctggaatgctggggcgtcctggcctccagggacagtcaggaaatagcacccgcccccacctgagatctgcggtggcaaggcctggctcttcacatcctcagaagaaaacccctaagataccctggaacaaatgtaagatcctccccgcagcccacggagccctttgcgacctgccctgtcccctccgtgccctgccctgcccttccctctctcccccttctctctctgctccagccatgcaggtctcctcactgcaggacctcttcaacatgccaggcggtcctgcccccgggcctttgcatgggcgtgcctctgcctagagctctctctcacatcttagcaagactggctccttttcacctctgggctcaacgggaatgtcacctcctcgaacacctctctcctggcccctgctgcctctacctcacccttcggagcacccgggaattctctgtctgccggcttcctgccggctttcctctgcagacagcagcctccaaggggcctggggagacccagcatggaactcgggcatttcaatatctattttttttttttttttagacagagtcttgctctgtcgcccaggctggagtgcagtggcgagatctcggctcgctgcaacctccgccccctggattcaagccattctcctgcctcagcctcccgagtagctgggactacaggcccatgccaccatacccagctaatttttgtatttttagtagagacagggtttcaccacgttggccaggctggtctccaatgcctgacctcaggtgatccacccgcctcggcctctcaaagtgctgggattacaggcgtgagccaccgcgccccgcctttttttttttttttttttttttttgagacagagtctcgctctgttgcccaggctggagtgcagtggtgcgatctcagctcattgcagcctctgcctccctagctcaagccattctcccacctcagcctcccgtgtagctgggattacaggtacctgccgccacatcccaccacatccagctaatgtttgtatttttggtagggatggggtttcaccacgttggccaggctgaagtcgaactcctagcctcaagtgatcctcctgcctcggcctcccaaagtgctcggattacagacttgagccaccataccggctgttacttcagtatcttctgagtgagtaacaatagtggccctgacacagcctgtaagcgtgggtgtcattatcctcattttccagatgggaaaattgaggcccctagagtgagtcggagccaggctccttccctgcagccctgcactcctctcctcccagcctggggcacctggaagggcccctgtaccaagcctggtggctggacctccttcctccctccggaggtgacctcatccccagaccctgggcccgcccccagagaactggaattgggaagtgaaaccaaaaccagcctctcctgctggtttctctggaactagggcctgggagggtttgcgcagattcctggggtccttggggaggtcatccgggggcagagcatgaactgtggactccagtgagaaggtcccttcctggctggactccctgttcctgctggccagtctgggttaaccattgttggggccaggctgcctggcctggggacctcgggcaagtgactgtgcctctctaggcctcagttttcagaaaacagggatagtggccaggagtggtggatcatgtaatcaatcccagcactttgggaggctgaggtgggaggactgcttgaacccaggaggtcgaggctgcagtgagtcgtgatcgtgccactgcgctccagcctgggcgacagagcgagaccctgtcaagaaaaaaaaaaaaaggccgggcgcggtggctcacgcctgtaatcccagcactttgggagaccgaggcgggtggatcatgaggtcaggagatcgagaccatcctggctaacatgatgaaaccctgtctctactaaaaatgcaaaaaaaattagccgggcgtggcggcgggcgcctgtagtcccagctactcgagaggctgaggcaggagaatggtgtgaatccgggaggcagagcttgcagtgagactccatctctcaaaaaaaaaaaaaaaaaaaaaaaaacaatgaaaagaaatgaaacagagaaagaaaggaaaagaaaagaagaggctgggtgcggtggctcatgcttgtaatcccagcactttgggaggctgcagcggatggatcacctgaggtcaggagttcgagaccagcctgaccaacatggtgaaaccctgtctctactaaaaatacaaaaattagccgggcatggtggcacgagcctgtagtcccagctactcgggaggctgaggcaggagaatcacttaaacccaggaggttgaggttgcagtgagctgagatcacgccactgccttccagcccgggtgacaaagcaagactccgtctcaaaaataaaaaataaaaataaataaaaaattaaaaaaagaagagaaagaagggtagtgaaagttcctgcccatggccaggcgtggttgctcacacctgtaatcccagcactgtggggggctgagacaggcagatcacttgaggtcagcggttcaagcccagcctggacaatatggtgaaaccttgcctctactaaaaatttaaaaattagccggctttggtggcacgtgcctgtaatcccagctactcaggaggctgacgcacgagaatcctttgaactcaggaggcgaaggttgcagtgagccgagatcccgctactgcactccagcctgagcgacagagtgagactctgtctcaacaacaacaaaacaaaaaaaaaaaaaaaagaaagaaagttcctgcctcacaggctgctgtgaggatagagttcatgtgtggcaccagcaaaagctccgtctattctgaaccacttcctgcttccgcagcttcaaagtgaggactgttcctaccttttccacagctgtttctgctacttggaatgcgcccctccacacactgctacccatccgtcaaaacctcaaagttaatgtccttccttctgaagcccatttgtgccatctgcccactcacaggagtgtttgtgtctgattctgagggtcgtctcgggattgtgggggagctccccaggacttgttaaagggcaaagtgagtccttagccaccagccccagacttgggggtgaaatacagaagtgggtgccattgccagggtaaccttcactcaagtcacctgctcaggcatcaagagcggctgcctgggcttctgctcccaacagaccctcctgaccctccaggcccacccaggtggcccccacctctcagctcccagggcaggtgccctccccgaggcggggaagaggggtgacggtggacgccttggtgtccggttggaccacctggttccctgaggtctgctttggaaaaacataaagccttcggttgctgtttctgtttgttttcttgttttggtttgttgttgttgttttttgtttttttagacagactctcgctgtgtctggagtgcagtggcgcgatcttggctgactacagcctctgcctcccgggttcaaacgattctcccacctcagcctcccaagtagctgggattacaggcgtgcgccaccacgctcggctaatttttgtactttagtagagacggggttttgccatgttggccaggttggtctcaaactcctgacctcaggtgaggaggcctcccaaagtgctgggatgacaggggtgagccaccgtgcccggcccgcccagaaattatcttacgcgactgtcaaagagcttatccaactattatgatcaaagaggcatttggggccctgggctccgctcagcaaccaatcccaacgtaaccacaaaggaagggacagccggtcccctccctgtctgccgccgcctcaggtaccccaggaatagcctggacataggaaacatgaaactccagtccccaagctgtgcctgctgcggagcctgccaccctcagaccactggagatccactgcctcttgcaaaaaatgtcatcacccagatcctgggtccaaccacccatcccagtcattgttcccaagggtgaggaggcacccgcctgcccctcctgccacctggaattccaagaactgagcaggattcctggccctgcctgctgaaatgccacatgtgtcccaaatgccaggacgcagccggcacttctgtgagggcaagaagagcagggaaggaggccggctaatcttcaggcccagggtccgggaggggagaggagggccgctgggaggcagccctgcagtcttatcgatgggcactggggcagggtgacccagcccatgacgccagcctcctgccctcccaacagccctctctaatcagggcagctcccccagacctagggggtccctgaccctggccagacagatagaggcaatgcaagaacagggcagagacccctgaccctccagtcccacccaggcggctcccaactctcaactcccggagcagcaccctcaaactgctgacgcaccaggttgccctggcagaacacacagagagagaggaggctctagggggcctgactgtccctcagccatagctgtcccagttggtcaccctaatagacgagctcaggctagacagactgacaaaggaggcgctgagcagtcaccaccaaccctccagagggttcagggtggcccgggggctcagacaaacaaaggcattcccactagaaagtcatgtagtcagatggtgagggccccgcaggtcagacagcagctctgaggcagacaggggaggctggaccaagggacagacagaggggatacggggcagttaaacagacagatgggggaggctcatggctcaggcagatagagaagccctgcacagttggacagatgggggaggcactgcacagtcagacagatgggggaggcacagcacagtcagacgggggaggctcaggccatggggcagaaagacgggggatgctggatggtgggacaggcaggggaggctcaggagtgacaccacagaggggccactgggtagtcagacagacgggggaggctcaggccacggaacagccagaggggtgaaaactcagctcatggggcagacaaacaggggagacttaggtcccaggcaggcagagagagggggctgggtggtgggactgatggaggaagctcaggccatgggcacagacagacagacaggggaggttcgggccaggggacagacagaggggtgaaaactcagctcatagggcagacagatacataggggaggttaaggccgtggacagacagtgcagggaagctcgggccacgggacagacagaccgaggggagactccgatcctgaggcaggcagacggcgggtggtgagtcagagggaggaggcgcccgggtcgcggagtctcggaggggctgcccgacaggtggcggggccgggacgcttaccgaccaggtgccaggccttgcgcgggccgtagcgggcgcagcagctggcggcgcggtcggcctcgtagcccacgagcggtgtgcacagcccgtcggccacctggcccagcagcagcagcagccccgcgccgcgggagctgtaggcgcgcaccgagtgcaggtagagcagcaggtaggtgaaccacatggacgcgcacaggtcgttgaggaagtggcccacggcgtagctcagccgcgccaccagggacagcggccgcggggacggcgccgctccggccgctgggggtcccgggcccatcgcggcgccgggcccgcgccccccacccccgggctccgcggagggtaccctggccaggccttcttgggtgccgtgggggcaggcgccggggacccccaccacgcgccgggcaccccgcgtcccgctctcttacggccgcgccctcacccacgtccgccgcgtccgccccacgctcgactctgcagccgccgggccccagagccgggcgactgcgccgggcggggcagggcggggaggttccggtgcctgagccaatcggagccgcgccccggggaaccgcagccaatcgccaaggagagaggagaggggcgtggccgcagggctcgttccgcctctacgacgggcgcccacgcggtcctagcgcccgccgggtatgagggcgaaccccgagcgcgccgcaggagtggccggcacccccatagactggggaaggaaatggaccagagggcaccgccggctcccacccagacccggcctccaggcccgcaccaccccagtccacccggagctggacagcccactgcgggccggggtggagcgagtgggacgggctctggatttggggttggggggaggtctgagcccgagctggcctcggggtccgctgactccccggcctagagagacgcgatcgggcgcggagaggacgcaacaacactaattaattggttactaacggtaatgatgggggtaatcaacataatagtaccagctggcctttaacgagcgttgcctgcaaagagccccacgtggtgacgcaaatttcactctcattttacaggcgaggaacagagttgcccgaggctcgcagtgagtcaggcgtctgtgactcccaggcctgtgcgcgcgaccctccccgtccaaccaacgtcctcccacaaacgggtcaccggactgagggtttcaagttcctccagggggtgtgtgcggttccccctaactcaggccctactccttccagcagcattttctcttctttcctctttttatttatttcagaaacagggtcttgagacgggcgcggtgactcacgcctgtaatcccagcactttgggaggccgaggcgggcggatcacctgaggtcaggagtttgagaccagcctggccaacaaggtgaaacccgtctctattaaaaatacaaaaattagccgagcgtggtgacaggtgcctgtaatcccagctactttggaggctgaggcaggagaatcgcttgacccaggaggcagaggttgcagtgagccaagaccgcgccattgcactccagcctggataacaagagtgaaacgccgcctcaaaaaagaaagaaagaaagaaagaaacggtcttgctctgtggcccaggctgcagtgcattggtgcaatcatggctcactacagcctcaatcttcagggctcaagtaatcctcctgtctcagcctcccaggtagctgggactacaggcacgcatcaccacatgtggctaacttttgtatttttaattttggagagacagggtctcactatgatgcttaggttgacctcaaactcctggtctcaagcaagcctcccaccctggcctccagaagctctgggattacaaacatgagcctctgcatcgggcgggtctccagcagttttctttctttctttctctctctctctctctttttgagatggagtctccgtctgtcacccaggctggagtgctgtgttgcaatctcagctcactgcagcctctgcctcccgagttccagcgattctcctgcctcagcctcccgagtagctgggactacgagcacccaccaccacgcccagctaatttttgtatttttagtagagacggggtttccccatattggccaggctggtctcaaactcctgaactgaagtgacccacccgccttggcctcccaaagtgttgggattacagtcacgagccaccgcgcccggcctacagcagtatatttggccttgcagtctgcagtgaggtatgattgcaccactgcactccaacctgggcaacagcaagaccccagctctaaaacaaaacaaaacaaaacaaaaggtccttgcagtatggaaggagaatcgttggatccagacttggttccactgattctctgctgctccacttgggacaagtctttttttttttgagacggagtctggctctgtcgcccaggctggagtgcggtggcacgatctcagaacactgcaacctccgcctcctgggttcaagagattctccttcctcagcctgctgagtagctgggattacaggtgcccgccaacacgcccggctaatttttgtaattttatttttattttatttttttttttttttgagacggagtctggctctctcgcccaggctggagtgccctggcgcgatctcaactcactgcaagctccacctcccgggttcacgccattctcctgcctcagcctccggagcagttgggactacaggcgcccgccatcgtgcccggctaattttttgtattcttagtagagacgggggtttcaccgtgtgagccaggatggtctcgatctcctgaccttgtgatctgcccgcctcggcctcccaaagtgccgggattacaggcgtgagccactgcgcccagcctgggacaagtcttttaacctcttggagcttgggtctcccctgatctagaacgggtacaggagttatataattggcctgccatggtggctcatgcctgtaatcccagcactttgggaggccgaggtgagaggattgtttgatcccaggagtccaagaccagcctgggcaatgtgctgaaaccctatctctataaaaaattttaaaaattaggccaggtgcggtggctcaagcctgtaatcccaacattttaggaggccaaggtgggcagatcacttgagctcaggagttcgagaccagcctgcccaacatggtgaaaacccatctctactaaaaatacaaaaatagctgggcgtggtggctgtgcctgtaatcccagctacttgggaggctgaggcaggagaatctcttgaacctgggagggctgaggttgcagtgagctgagatcgcaccactgcactccagcctgggcgacagagcgaagatccgtctcaaaaaccagaacaaaacaaaacccaaggctcaaacagccaaggggtccacggccccggctgcccacggtgatgcaggtcacacactgttttatgaaaactagactgaaaatgggcgggaggggtaaaagaggtcaagacacagaacctagaaaggaaggaggagagataaggggcagacgactcggggagataaagggttgaggagagataagaacctcaattccttcctctctgtttggcacgttcccacttagagtcctcctggcacgttcccctttagagtcctctgagggaaatgaaagatgactttttgaaatattagcctagggaccagggatcctggctcccgcctgtaatcccagcactttgggaggccaaggtgaaggggtcacttgaggtcagcagttcgagaccagcctggccaacatggtgagacccccgtctctactaaaaatacaaaaattgggccaggcgcggtggctcacgcctgtaatcccagcgctttgggaggccaaggcgggtggatcacgaggtcaggagttcgaaaccagcctggccacgatggtgaaaccctgtctctactaaaaatacaaaaattagctgggcgtggtggcgggcgcagataatcccagctactcgggaggctgaggcaggagaacggcttgaatccgggaggtggaggttgcagtgagctgagatcgtgccgctgcactctagcctgggggacagaccaagaccccatctcaaaaaaaaaaaaaaattacagtaattagccaggcgtggtggtgggtgcctgtaacccagctactccggaggctgaggcaggagaatcgcttgaacccagaaagtggaggttgcagtgagccaagatcgcgccactgcactccagcctgggcgacggaggaagaccctgtctcaacaacaacaacaaaattagccaggtgtggtggtgcacacctggagtcctggctactccggaggttgctgtgggaggatcactgaagcccaggaaacgaaggctgcagtgagctatgatcgcaccactgtgctccagcctgggtgacacagtgagactcagtctcaaaacaaaaacaaaaaaactaatgtttttcccattcctcatctcctttcatcccacaagatccctaggaggtcttacaccacttcatgctctattattttattttattattaatttttatttttagagacagggtcttgctctgtcacctaggctggagtgcagtggtgtgaccacagctcactgtagccttggcctcccgggctgaagagatcctcctgcctcagcctcttgagtagctgggactacaggtgcctgccaccacacctggctaattttttcagagatggaagtcttgctatgttgccctgactggtcccaaagagatgggattacagacgtgaggcacagtgtgcagccttcatgaccccctccactgccttttcttgttttttttgagatggagtctcactttgtcgccaggctggcgtgcaatggtacgatctcggctcactgcaacctccacctcccgggttcaagcgattctcctgcctcagcctcccgagtagctgggattacaggcgcccgccaccacgcccagcttatttttgtatttgtagtagagacgggatttcaccatcttggccaggctggtctcaaactcctgacttcaggtgacccgcccgcctcggcctcccaaagtgctgggattacaggtgcgagccactgcgcccagcccttcatgcctcttttacagataaggaaactgagtttcacaaagacgggcatgggcatgggactgtggcgggcatgggactaacaagaggcagatgtgggatttgaactcagctccacgtgacctctttatgtgctggctgcggaatgccacctgagtgtggaggaacaggtgcctcactgtccactgctttttcagcctcctttgtaggtcgagaatcaggcacaatcccgcctccctttggagaagatccagcggaggaggcagggtgtggttaaagcgccaacacatctctgcattcttgtccttttgctgttgtggtggttgttgtttgagactgagtcttgctctgtcgcccaggctggggtggagtagcacgatctcggctcaccgcaacctccacctcccgggttcaagcgattctcctgcctcagcctcccaagtaactgggcttacaggcacctgccaccacgctcggctaattttttgtattttttagtagagacggggtttcgccatgttgctgtttcgccatgttgtgggtcggttctcgaaattcctgacctcccaaagtgctgagatcacaggcatgaatcaccatacccaacgtagtttttttgtttttgtttttgaagacagagtcttgctttgtcacctaggctggagtgcaatggcgcagtctccgctcactgcaacctctgcctcctgggttcaagcagttctgtatcagcctcccgagtagctgggactacaggcgagcgccaccacccccagataatttttgtatatttagtagagatggttttcaccatgttggccaggctgctttcgaactcctgacctcaagtgatccgcctgccacagcctcccaaagtgctgggattacaggcgtgagccaccgcgcctggccacccaaagtatttttgtttgtttgtttgtgacggagtctcgcctgtcgcccaggctggagtgcagtggcgccatctccactcactgcaagctccacctcccaggttcacgccattctcctgcctcagcctcctgagtagctgggactacgggcgcccacgaccacgcccggctaattttttgtatttttagtagagatggggtttcactgtgttagccaggagggtctcgatctcctgacctcatgatccccctgcctcggcctcccaaagtgctgggattacaggtgtgaggcactgcgcctggccacccaaagtatttttaaattttttgtagagatgaggcctcatcattttgcctaggctggtcccgaccacctggcttcaagtggtcctcccggctcagcctcccagagtgttgggattataggcatgagcctcggcacctggcctctgtttttgtccctttgaagccagctaatatttcctagccctgactttgtggggtgagcaggaactaggtctgacctcttgctgaggagccccaaagattctgaagcccctgcttttgaggggagacagggatgacccctcccagttcccctcatcagggacaggactggaggagtcagaccaagaagggcggttacaaggtaggtgaggagttgggacattaccctgaggtcactagggagccatggtaggggttagagggagggtgggactgagtcagattaaaaagtccagtgggagatgaggaagggcttcttccaaatgaaggcctcagctgcgtgcgtggggaagccacaggagaggacatgtgccccaacaagagtgggggttggacgtgagggtaaagatcagagaaggccctgtctagagatgtcaggaaggcatgatgaaagctcaggccctcggggtaggacagaggagtcaggagagatcctcacagtctgatgtccccagcccatcaccagcagccccctgacgccaagcctgcgttccccctcccctggccggacatcggatgtcctgatggccgcagtccagcctcggggtggggtggggaatgtcaagtactagaggcttccttgatcttctgtgacccaggcctggggtgacagaggtgggggggtgggcagtgagggttcctgaggctgcactgaaacttccttatatctgagggtggccacggtggaggcgggggagcaggggagcaaagccaggatcaaatctgggcagtccctgacaagccaccaagcttcagttgccctctctgtaaaatgggggtgaggtgagagtaaccgaaccaaacagaataccaggaggcttcaaccacacaacttggccgggcgcggtggctcacacctgtaatcccagcacttagggaggccgaggcaggtgggtcacctgagatgaggagtctgagaccatcctcgccaatatggtgaaacctcatctctactaaaaatacaaaaaattatctaggcctggtggtgcatgcctgtaatcccagctactcgggaggctgaggcaggagaatcacttgagcccgggaggcagaggttgcagtgagccgaggtctggccattgcactccagcctcggcgacagagtgagactccatctcaaaaaaaacattagctgggcatggtggtggccacctataatcccagctactcgggaggctgaggcaggagaattgcttgaacctgggaggcagaggttgtggtgacctgagatcgcgccattgcactccagcctgggcgacagagtgagacccagtctcaaaaaaaaaaaaaaaaaaaggatggggagggagggaaggaaggacgaactctttttttttttttttttttttttgagacggagtcttgctctattgcccaggatggaatgcagtggcacgatctcagctcaccacaacctcctcctcccaggttcaagcgattctcctgtctcagcctcctgagtagctgggattacaggtgcctgccaccacgcctggctaagtttttgtatttttagtagagacgggggtttctccacgttggtcaggctgctctctaactcctgacctcatgatctgcccgcctcgggctcccaaagtgctgggatgacaggcgtgagtcactgcgcccggcctcttcagtcagtctttgcgtgactcagtctttgccaggaccctcctggcctcaggtcctgttcagtatctggtctaccattgccagaaggagcgcattctgtgagtcttgtgatttacgttttaacgttgatgctggtcagtccttgcgctgagagcaaaacggggaggagctgtaacgaagcgcggtgacctcctggcacggcagggcctggaactcggagctttttgttgttgtgttgtgttttgagacggagagtcgctctgtcgcccaggcaggagtgcaccggtgcgatctcagctcactgcaacctccgcctcctgggttcaagcagttctcctgcctcagcctcccgagtagctgggagtataggcgtgtgccaccacatccggctaagttttttgtctttttagtggagatggggtttcgccatgttggccaggctggtctcgaacccctgacctcaggtgatccgcccgcctcggcctcccgaagtgctgggattccaggcgtaagccactgtgcctgaccaacctcggtactcctgacgtttgggacatcattttttgtggtgggggccgtgtaggatctctggcctcaaccgtgtagatgccagtagcacccccctagtccgacaatgaaaaatctctctagacattactaggtatttcctggcgtgacagagttggccccggatgagaaccactgagctagagcgttttctgtaacaggtgtttgattctccctggacaatcccagccagcaacgtcataaaggtagacaaagcaattatcccacttaacagatggagaaactgaggcacagaagttgagtaaattgcccaagtcccacagttgaggctcagattgcttccctgagttcctgagggcccagcagcagtggggtgcccctcctcagaggcctgagatccctgtcccaccagccctgtgttctgccagccccggggccaggggatgctaggggcagtagctctctttccgcttccctgtcgccttctcagctctccagcatctgtttaagcaatgcctgtatgaagttgcctctataaaaagccccaggaggcttgagattgtccgtggcctgggagaaccaaccacaccctgactctccctgggtggtggagaaaagtccacacatccatgttgattaatatctattaaaaatttaaggtcaggcgcggtggctcatgcctgtaatcccagcactttgggaggccgaggcgggcggatcgcgaggtcaggagattgagaccatcctggctaacacagtgaaaccccgtctctactaaaaatacaaaaacttagccgggtgtggtggcgggcgcctgtagtcccagctacccgggaggctgaggcaggagaatggcatgaacccgggagacggagcttgcagtgagcagagatggcgccactgcactccagcctgggcgacagagagagactccatctcaaaaaaaaaaaaaaaaaattaatgggggcatgtaatcccagtactgtggtactgtggtactgtgggaggctgaggcaggaggatcacgaggccaggagtttgagaccagcctggccaacatggcaaaacctcatctccactaaaagtacaaaaattagtctcgcatggcgatgtgtgcctgtaaccctggctactctgaaggctgaggcacgtgaatcacttgaacacgggaggtggaggttgcagggaggtggaggttgcagggagctgagactgagccactgcactctagcctgggagctgggcaacaaagcaagaccccatctgtacgaaaattaaaataatcagccagatgtggtggtgcatacctgtggtcccaactgctcgagaggctgaagcaggagaatcacttgagcccaggagttcgaggttgcagtgagctgagatccgatgactacactccagcctgggtgacacagcgagacaccatgtctcaaaaaataataatagtaaaaaataccctttatctgagcgatattattgagtaaacagaactggttgcagttgaagcttacagcatgaaggcactggtataatacacagcagaataggacctcacatttgtttgcttacttttattattatttttttttgtagagacagggtctcactatgttgtccaggctggcctcaaattcctgggttcaagcaatcctcctgcctcagcctcccatagtgctgggattacaggtgtgagctactgcacctggccaggacctcactttatttatttatttatttttttgagacaaagtctcgccatgtcgcccaggctggagtgtagtggctcgatcttgactcactgaaacctctgcctcccaggttcaagcaattcttgtgccgcagcttcctgagtagctggagctacaggtgtgcaccaccatgcgtggctactttttgtatttttagtacagacagggttttgccatgttggccaggctgttcttgaaatcctgacctcaggtgatcggcccactttggcttctcaaagtgctgagattacaggcgggagccaccacgcccagcctatatttttatttatttatttactattttttgagagggagtctcgctctgtcacccaggctggagtgcagtggcacgatctcagctcactgcaacctccgcctctaggttcaagtgattctcctgcctcagccttctgagtagctgggactacaggcgtgcacccccatgcccagctaatttttgtggttttacttttttgtagaattttttttttaactgtgaatacacattttttatttggtcatttttgcttacaattgaaactctgggaattcaaaattaacatccttgcccatgagcttcttatagacaccagaaaaagtttcaaccttgtgttccatattgttctgctgtgccttgtccaaatgaacctttatgagccggctgccatctagtttcacgcagattctctagagtttcaactgtaagcaaaaatgactaaataaaaaatatatattcacgttaaaaaaattttttttttttttttgagacggagtctcgctctgtcccaggctggagtgccgtggcgggatctccgctcactgcaacctttgcctcccgtgttcaagctattctcctacctcagcctcccaagtagctgggattacaggtgcccgccaccacgcccggctaatttttgtatttttagtagagatggggtttcaccatgttgaccaggctggtctcgaactgtggacctcgtgatcctcccacctcagcctcccaaagtgctgggattacaggtgtgagccaccgtgcctggcaatttttgtgtttttagtagggacagggtttctccatgttggccaggctggtgtcaaattcctgacctccagcgatccacccacctcggcctcccacagtgctggcattacaggcgtgagccaccgcgcccagcccacgtctttattaggaatacgcacatgtgtacgtgtgtaggcatgtgctgtgggtggagtcatgtccccacagaatgcacaggttcctgtcctaatccccaaggcctcagaatgtgaccgtatttggaaaaaggtcattgcagatataatgagttaagatgacatcattagggtgggccgtgacgcagtatgactgctgtccttatcaaaagaggaaatttgggtgcagacacgcacatagggagaaccccacatgaagatgcaggcagacatcggggtgtcactcctacaagacaagaaaagcccaggattgctggccaatgccagaaactgggagacgccagggacagattctctccccgccctcagaaggccccagccctacccacaccttcctcttggacttctggcctccagaactgtgaaacaataaatttctcttgtttaagcccctcagtttgtcgtaattattacctagcaaaccaatgcagtgtggtgtgcgtgtgtgtgtgtgtgtgtgtgtgtgtgtgtgtgagtgtggctaggaaaaattttaaaaagagatgcggccgggtacagtggctcacgcctgtaatctcagcactttgggaggccaaggtgggcggatcatctgaggtcaggagttcaagacctgcctggccaacatggcaaaaccccgtctctactaaaaatacaaacattagctgggtttggtggcacgtgcctgtaatcccggctactcaggaggctgaggcaggagaatcacttgaacctgggaggcggaggttgcagtgagcaaagatcacgccactgcactccagcctgggcgaatgaaactctatctcaaaaaaaaaaaaaagaaaaaaaaaaggcctggcacagtggctcacgactgtaatcccagcactttgggaggccaaggcgggtggatcacaatgtcaggagatcgagaccatcctggctaacacggtgaaaccccatctctactaaaaaatacaaaaaaattagccgggcgtggcagcgtgtacctgtagtcccagctacttgggaggctgaggcaggagaatggtgtaaacccgggaggtgaagcttgcagtgagccgagatcgcgccactgcacactagcctggacgacagagcgagactctgtctcaaaaaaaaaaaaaaaaaaaaaaaaaaagcaataagctgacgataggaaatgtaatgaaattaaagaggtctgagctgcacttccttaattctgtacaagtgaaatggatgtgaacatgatttgcataataaaaattaattagaaaaccaaagaattataaggcaagtcatccttaatggagagcttccacctctaggattataaattggtatactgttcctggcttcatgctataaaaactggcaaataaatcatagtaataaatgacaaaaaacaaacaaaaaggccgggcgcagtggcccacccctgcaatctagcaccttgggaggccgagacgggcggccacctgaggtcaggagttcaagaccagcctagccaacatggtgaaaccctgtctctactaaaaaaaaaaaaaaaaaaaaaattagccgagcgtggtggcggatgtctgtaatcctagctacttgggaggctgaggcaggagaatcgtttgaacccgggaagcagaggttgcagtgagccgagatggtgccactgcactccagcctgggcggcagagcaagactccatctcaaaaaaataaaataaaataaaataaaataaataaacaaaataaaataaatgttcaattaaattgttattgactatggccgggaggggtggctccacacccagcctcacctagactatttttaagtgagcagagagacacaggggaggcctgggaggtcagagagctgattaagcaacagagccaggtctggcgtgtggaaccgtccagattccagggccagctcctcttcctcagccccgggctgcatcttaggacaatgggcttattgagacttaactcacatataatgcacccatttagagcatacaattccatggtttgtaatatatttccagagtcacgcagccatcactgaaatcaaattgtaaaatactttcatcacccaaatgaaaaccgcatccctctcagtggtcattccccacccactggcacccacacgtccccctcctgtctctgtggatgggcctttcctgaacattctgatcacacactgtgtgacctttgtgtctggcgtctctcactgagtgtgatgtcttctaggtacatccatgctgtgacttgtgtcagagactcgctccttttttttatggctgataatattctttttttttttttttgagacgtagtcttgctctgttgcccaggctggagtgcagtggcacaatcttggctcactgcaacctctgcctcccagttcatgggatcctcctgcctcagcctcccatgtagctgggattacaggcgtgcaccaccacgcctggctagtttttgtatttttaatagaactggagtttcaccatgttggccaggctggtctcgaactcctgacctcaagtgatccgcctgcctcccaaagtgctgggattacaggcgtgagccactgcgcccggcccatggcggataatattctgttgtaaggatatatcccgtcatcgatccatgcatcattagcagacgtttgagttgttttcactttttggctattatgaatcacgctgctaccgacgcttgtgtacacgcttttgtttgaacacctgttttcagttgtctggagtatattcctaggagtgaactgctgaattgcatggtgattccacatttatttaaccctttgaggaaatgccagtctgttttccaaagcagctgcatctgcctcctagacatctgaaggattcaatgaatgtgtattgagcatccaccatgggcaatgctgtgaaccaaacaggcaggccacagggagaagccgacttatggaggcaaaaaaaaaatcagagaaggcctggctgagcaagtgacatttaagcggacttgaggaagaggaagtgggccgggcgtgggggctcacgtctgtaatcccaccactttgggaggccgaggcgggtggatcacgaggtcaggagttcaagaccagcctggccaagatggtgaaaccctgtctctactaaaaatacaaaaattagccgggcgtggtggcaggcgcgtgtaatcccagctactcgggagggtgaggcagagaattgcttgaacccgggaggcagaggttgcagtgagccgagatccagccactgcactccaccctggacgacagggtgagactccgtctcaaaaacaaaagaggaggtgagcagccccaacttgggccagaagcctagactgctgctgggaggtccctgatccaccagagcggagcctcctgacccatcctcacgaagtccttgccatctcccttcaccaccatctttccccaaacacttccagcccagctcccaaccccaccccctgcctgacccacacccagttctcagcttcccagcatcccagtctctctgtcctggatatcgtgtgatgtccccgttgcacaggggggaaagccgagaccccagagggagagcagcccctatggccagaagccctcggatccggacgtcgggggctctaaactgagtaaatacataggaaacttctccgctaggttttgcaggatgttaagaacaggtcccaccttgcctagggctggggactgcctcgcaggaccttaaccctagcaacccacctccgtccccatggcaaccggggcggggcccgacccggatccgccggtcgccccatccggcagcggctgggagtcttgccttcagagagggaggaggagtccgcgcctctcctactggccctttaagaggctccgcccggcaagtccgccactcgctcccgattggtcccgagcgcggccgagcgcagccgaacttgacgcaccgcccgcagccttccttaccaacctcccacgcgactcagcaacctccccaaccaatcgccggccggcgcgccgatcggtatctgcatgggctcgcccggggggaaggtctcacccaatgggaccgttcgccgaggccttcattagcatgccgggggcggggaggggcggggcggccgacgggggcgggctgcgggcggttggttggagcgtcgcgcagtcgggaggtccgggaaagtttctttggaggtgaaaacagccgcggaactccgggccctgagagggggcgggggtgcaggggtcccagggccgggccggggtctttcctggcccgggggaaaccggcccaggcctcccggggggggcaatcgcccaacaaaggattcttggggcgcccgccctcgaggacttccctgcccctggatccggcccccccagcgctccgggcccggcatcccggggctctccatcgcggggtaccccagttcgcggtctgccatcgggcagcccgggcgctactcacctccgcccgcgtccgtgttccaggtccggcccggagcggccatgtcccacggccccaagcagcccggcgcggccgccgcgtgagtgcactgatcccctccccacgccctcgctactttcccggctgcagccctagctcctgaacccctgacccagtccctcccgccggagtcttgactcccccacctgggtcagggggcttctccctccacccaattctgcaccccccacctcggcctccagtccctcccaggagccccgcttgtcccaccttccccggatactgaccccatcagaccctgcctcctcgggctcatgcactctcgctgcagccccgccgtcgggggtcaaaacgccctggggtgggcttttgggggaggggagattcttgggacggggctgaccgcggtatccttggctccaggccggcgggcggcaaggctccgggccagcatgggggcttcgtggtgactgtcaagcaagagcgcggcgagggtccacgcgcgggcgagaaggggtcccacgaggaggaggtgagagtccctgcgctgagctgggggaggccccgggctcccgccccagcctcgaagccccgccccaggctggatttgaattgcttgtggctccgcccacagcccattttcctctggaagctgagaccccgccccgtgccagctgccacgcccctgacaggtcctctgccactctaagtccaggccccgcccaccgcacaatgccagctctgcccactctaaggtcccgcccacttccactccttgggggcggcaccctccccttggtcctgtgggcccgttctccagcagaaaaccacgcccaccaagcagaggccacgcccacaaccgaagtcaacgccaaccctgtactcaaacctcggcccatagttcctcagatcccctcacccctggccagggatccctctaacccaccgtgtcccgactgctgaccgggccctacctccatcttttccgggttcttcctcccagctaggccccgcccccatccccgcccatacgcgttaggccccgcccatgcccctctgagccctgccccagtacgccaggcccccctcccaacgacgcagcccggttctgcagccggtgaagaaacgcggctggcccaagggcaagaagcggaagaagattctgccgaatgggcccaaggcaccggtcacgggctacgtgcgcttcctgaacgagcggcgcgagcagatccgcacgcgccacccggatctgccctttcccgagatcaccaagatgctgggcgccgagtggagcaagctgcagccaacggaaaagcaggtgggcggggcggggcgccgagcagggctggcggggtccacggactaccccccagtagccccgacccccaaaggattccacgtgcagggtttttccttcttcctggagaaatgcccacccataaccaactttttttttttttttttttgtgagatggagtcttgctctgttgcccaggctggagtgcagtggcgtgatctcagctcactgcaacctccgcctcccggcttcaagcaattctcctgtctcagcctctcaggtagctgggattacaggcgcgtgctaccatgccctgctaatttttgtatttttagtagaaatggggtttcgccatgttggccaggctggtctcgaactcttgacctcaaatgatccgcccacctcagcctcccaaagtattgatattaaaggcgttagccaccgtggccagcccatgaccagcttttgggggcgcggctagcaagaggcaagacagattgaaaactggatgaccaacaaagatatgtctaagaagtcaggatggggcctggattttttgcgaaacccgattttcatatcctgttagtttaaaaattgcaaaaacatcacggaaatgtaacaaaagccatcactgctttgcatccctgtaagtgagatttcaaagagagaaacgggtgcgggagggagtccaggcatccgcatacgctggaggttgggttcctgcccatgactctggcgtccgggagtggtttgtcagggctggaggtggggaagagtccggggcatgggaagtgaggtgggagctcggaggtccctgagcaacaggctgaggagccggttctgtctgcctggagggaatagggagctatagaaggttcaggagaggggagggtgctgtgaaagcagagtgataaagactggatcctggcgttggaggcttcccctgcttcaagccttctggtgctgccccccagcggtacctggatgaggccgagagagagaagcagcagtacatgaaggagctgcgggcgtaccagcagtctgaagcctataagatgtgcacggagaagatccaggagaagaagatcaagaaaggtgggaggggtcgggcgcggtggctcacgcctgtcatcccagcactttgggaggccgaggcgggtgtatcacctgaggtcagaccagcctggccaacatagtgaaaccctccccctctactaaaaatacaaaaattacctgggcgtggtggcgggtgcctgtaatcccagctactcgggaggctgaggcaggagaattgcttgaacccgggaggtggaggttgcagtgagccaagattgcgccattgcactctagccagggcgacagggcgagactccgtctcaaaaaaaaaaaaaaaagaaaaagaaaaatgaaaggtgggaggggccggtgcgagcagttggggtcctgctctgtggggtgcgacctcagcccaggcagggcctccctccgtggggcacagtcccgtgggttgggcgggggaaagatacatagccagacaggagtgaagggggctcactcggtacagcgatgggggatgcccagacgcggggcactcaagtggggagctggagccggctgagcagcgctgacctagggtgcagggcgtggtccctggaggcctgggaggctgaccctgcccttcccctcccccgccagaagactcgagctctgggctcatgaacactctcctgaatggacacaaggtaagcgaccttcttcctctcaaagcacctgggggagaaaggtctggaggcttctagaaccctgagtcagagccagtgctcgcccagatgtgtgcaagcaggggcggtgccactgcaccgtgggatcgctgttgattgtactcccaccggggtgtcccaggagaccctcctaggcttggggcacacccagagagcgtggctgcctcctaccaccagtaaattgccaccttgtcccttcgtcttagggtggggactgcgatggcttctccaccttcgatgttcccatcttcactgaagagttcttggaccaaaacaaaggtgagcggtaactgcgctcctgatgcgaactccgtgaaactgggtggtagaggggggcgtgggccaggagggccccaagactgcaggaggcggatcgggaggttccctatgagcgtccaggcgcacgctgtcgctccagaggctgatgtggagcaggaggcagagggcgcagtgagggaaacctgggcaggggcacgtcccgggcaaaagcccggaggtaggggaaaggggaggcgcaggctttgaccccgctccccccggcgcagcgcgtgaggcggagcttcggcgcttgcggaagatgaatgtggccttcgaggagcagaacgcggtactgcagaggcacacgcagagcatgagcagcgcgcgcgagcgtctggagcaggagctggcgctggaggagcggaggacgctggcgctgcagcagcagctccaggccgtgcgccaggcgctcaccgccagcttcgcctcactgccggtgccgggtgcgggccacgcccatctcccagtcccgccccggtcacccggccccgcccgcctccccccccctcctcccttccccccttcccctgtcgcccggcgccgcccatcgccccgtcccctcttccccagtcacccggccccgcctatcgccccgccctcatcacccccagctccgcctcctccccgacccccgcacccctaccccatagctccgtctggttcttcccagaccacacccgagctccgctccgcgccccgttactcggccggctccctgacctcgcccccaccgaccgcgcctcccggccacgacctctcccgacgcgtccccgcttactcgcttcctcccgcagcccctttgtgcccccacccttcgcgcccccaccgctccctaccggccccaccgtcgctggcccctctccctcgccagcccccgaccagcctgagcactgacccagcctccccgctcgccacgccacgttcccattcaccccacctccccacgcccccgtcacccatccctccccacgccccgctgacgcctgagccccctccaccaccccagtcacgtcccacgcgaccccagccccccggtgtcatccccacctccccgacctcgttccctccgtccgtgactgtcctcagcggaccctggacgcccgccgctctagccccgcgtccccaccctgtccccgtcctcgccatcctcctgccccggcttaccttagcccaccctgcgccgctcctgcgctggcggtgtccggacctctgagcgcccgcgcgacccgccctgagtcaccccctaccgctgcccctggagcccccgccccgcgactccccggcaccctcgcctgaccttcccgcctgtcccccaggcacgggcgaaacgcccacgctgggcactctggacttctacatggcccggcttcacggagccatcgagcgcgaccccgcccagcacgagaagctcatcgtccgcatcaaggaaatcctggcccaggtcgccaggtgtgtgccgggcgaggcggggcggggccggggttcaaggcccggatgtgcccgccctggggttccccaggtccgcgagggctgctgggtgggactccgcagcttactagagatcacctcccggaggggcctacctgcggtcgcccctgatgcaccagtgctaggatggccatggagaaccccgggccggcgggacccactcgggggcaccagaacttccctaaagcttctcagggtggatcccagcgcccgggttagataggttcaacgcctgtcccccaaccctggcatctgttggagcagctgatgggccatggtctctggggttccccagggccggggtgggggccagagatgatgagggcctcatcccgggccctcctctctcgtttcagcgagcacctgtgaggagtgggcgggcccacgatgcagaggagaagctgtgggcgcggccctgccacaccccaccccgtggacgagaggctgggggtccaccctttggggcctggtcccatcctgcaccttgggggctccagcccccctaaaattaaatttctgcagcatccctttagctttcaatctccccagccccctgaacccggaaaaagcactcgctgcgcgatacacccagaagaacctcacagccgagggtgcccctcctcggaggacagccacgcgctacactggctctccgggccacccccaggacacagggcagacgaaacccacccccagcacacggcaggaccccccaaattactcactacggggggctgtgccataggccacacaggaagctgccttgtggggacttacctggggtgtcccccgcatgcctgtaccccagatgggtgggggccggctttgcccatcctgctctcctccagccgagggaccctggtgggggtggctccttctcactgctggatccggactttttaaataaaaacaagtaaaatttgtgttttaagcttgtgagtgtgtaagcttgtttggggtggtgtggagggttcagaaggtgcagcctgggccccccatgacattccctgctgggggcgccaggcctgctctctttacctctagcagagcctcagagtttctcagatagggagacgggagcccaaacttgccggggttcacagagcaagtcaatggctgggcaggtgtctccatccctcccctacctaaagttgggcattgtgggctcagcacacgtgggggacttgaagcacaggggacagtcacggctgctcagttcatccttcaacttgtgtccgcacgggggttcaagtccactttgtagcacagtgactttgggtgggccacggttttgtttattgtgtaaaatacgcaacatgaaccttaccatcatagccattttgtttatttattggagacgcggtctcactctgccacccaggctggagcgcagtggcccgatcatagctcactgcagccttgaactcctgggctcaagcaatcctcctgcttcagcctcccaaaccctgggattacaggcgtgagccaccgcgcctggccattttagccattttaaaatgcacaattcagtggcatttagtacatcacaattttgtgcagtcatcacctttatctaatctcaacgcattctcatcacccccagaggaagtcctgtcctcatcaacagtcactctcatcccctccccagctcctggcacccacaaatccccttcctgcctctgtggattgacgtgtcctggatatgggaccacacactgtgtggccttttttttttttttttttttgagacagagtcttgctccgtcacccaggctggagtgcagtggcacgatctcggctcaatgcaacctccgcctccctggctcgagtgattctcctgcctcaacctcctgagtagctaggactacaggcgtgtaccaccacactcagctaattttttgtatttttagtagagatggggtttcaccgtgttagccaggctggtttcgaactcctgacctaggtgatctgcccgcctccgcctcccaaagtgctgggattacaggtatgagccaccgcacccggactatatgtccttttgtatctggcttctctcactgagtgtgattgtcctccagatttatccacgctgtggcctgtgtcagagcctcattccttttggtggctgagtcattgtccagtgtgtggatgaatccgctgtattgaccccatctatctgtcaaaggacacttggctatttctaccacttgtgagtcatgctgctgtgaacattcatgtacatgtttttgttagaatgcacattttccattcttttggagatacagattgctgggagttctgcatttggcttgttttgtgtacgtgtgtgtgtgtgtgtgtgttgcttattgagaaacctttccagggacttctgcgtttaatggcatacataagacatcctaaaaaattcggagaataatctgaaccccagaacctctgaacgtgaccttatttggaaatagggtcactgcagatataattagttaagattaagtcattactggagtagcataggccctaagtccaagatgactgctctccttataagaagataaaatctggacacagacacagagaagagacagccaagtgacaacagaggccgagactggagtgatgtatctagaagccaagaaacgttaaggaaggccacccacagccagaagctgtggatgccaggaaggattcttcccaggggctccgagggccctgccaacaccttcattgtgggattctggcctctggagctgtgagaggataagtttctgctgtgttatgtctccctgtttgtgatgctttgtttttgtttattttttattttttaggggttgggggggggtctcactatgttgcccaggatgatcttgaactcctggctcaagtgtcctgctgcctgggcctcccaaagtgctgggattacaggcgtgagccattgtgcccgcccacctccatcccacactgcttcttcttcttctttttcttttttttttcagacagagtttcactcatgtcacccaggccggagtgcaatggcacgatctcggctcactgcaacctccaccatccaggttcaagcgattctcctgccccagcctcctgagtagctgggattacaggcgcccaccaccatgtctggctaattttttatattttagtagagatgtgatttcaccatgtcagccaggatggtctcgaactcctgacctcaggtgatccacctgccccagcctcccaaagggctgggattacaggcgtgagccaccgtgcccgacagctttttttttttttttgagacagggtcccactatgttacctaggctggagtgcagtgtcgcaatcatagctcactgcagcctcgacctcctgggctcaggtgatcctcccacctggttctcgtgagtagctgggaccacaggtgcctgccatcactcctgcctaattatttatttaatttatttatttatttatttttctgtgagacagagtctcgctctattgcctaggctggagtgcaatggctggatctcaggtcactgcaacctccacctcccgggttgaagcgattctcccacgtagctgggattacaggcactcaccatcaagcctggctaatttttgtattttgagtagagatggggcttcaccatgttgcccaggctgatctcaaactcctgacctcaagtgatcaacccacctcagcctcccaaagtgctggaattacaggcatgagccaccatacccagtcaatttattggtatttgtgagatggggtctcactatgttgcccagactggtcttgaactaccgggttcaagcgatccatctgggccagcctctcaaaacgctaggattacaggcataagccactgcacccagctgtttctttgtggttgagacaggatcttgctctgtcacccaggctgaagtgcagagatgccatcacagctcactgcagcctatacctcctgggttcaagcaatcttcccatctcagcttcccaagtagctgggactacaggtgtgtgccaccacaccccgctaattttgtattttttgtagagatggggtctcaccttattcctcaggctggtctcaaactcctgggctcaagtgatcctcccgcctcggcctcccaaagtgctgggatcacagtcaagagccacctcaccacacccagtttttggtgctttgttacagccatcatgggcgagtcagacaacctgatactgccaacccccctcactccccaccccagtttcaccctgtcctggcacaggtaccaccaccttaaatttagagtttctcatttctaggcaggcctggaaaatagcattttgcagcagttttttattaaaaaaaatttcagtatacaattcagtaggttttggtacattcaaaaagctgtgtgggctgggcacagtggctcacgcctgtaattccagcagtttgggagaccgaggcaggcagatcacttgagaccaagagttccagaccagcctggccaacatagtgaaacccggtctctactaaaaatacaaaaatagccagggatggtggtgcatgcctgtaattccagctacttgggagactgaggcaggtgaatccctctctctctctctttttttttttttgaggcggagtcacgctcttgtctgtcccaggctggagtgcagtggcgcgatcttggctcactgcaacctccgcctcccgggttcaagtgattctcctgtctcagccttccaagtagctgggattacaggcacatgacaccatactcagctaatttaatttttgtatttttagtagagatggggtttcatcatgttggccaggatggtcttgatctcttgaccttgtgatctgccttccttggcctccccaagtgctgggattacaggggtgagccaccagacctggccttttttttttttttttttttttgagacagtctcactctgttgtccaggctggagtgcagtggcatgatcttggctcactgcaacctccgcctcccaggttggagcaattctgcctcagcctcccgagtaactgggactacaggtgtgcgccaccacacctggctaatttttgtgtttttagtagagatggggtttcactgcgttgtccaggctggtctcgaactcctgacctcaagcaatccgcctgcctcagcctcccaaagtgctggattacaggcatgagccaccgtgcccggccttacataaaatttcttacctcgtccaaaccctcctgccactttcttttctctccccatgttcagtttgtgaggctcctcctgggcggaggctgtgactggctctgctgtagggcccgccactgcaggcaggatggctgtttattgagccgacattcctgggtaggaatctgatggatacgtaggtgtttctgacattgcactccagcggatttttaccaacgcctcctggtgcctggggtctcctccttcatctgtgacctggacatccgttcattcctcaccaaagatcactgggcacctgctgtatgccaggcactgtgccctggacactgggcatggggacagagcaggggaacagcccccaccctcctggagctgacattcctccagtcctggggacaaacaggacaaaagatgaaatgaaatatcagcagggggctggggctcaagcctgtaatcccaacattttgggaggctgaggcgggaggattccttgaggtcaggagttcgagaccatcctggccaacatggtgaaacccccgtctctactaaaaatacaaaaaaaattagctgggcatggtggcaggtgcctgtaatcccaactaatcaggaggctgaggcagaagaatcgcttgaacccgggaggcagaggttgcagtgagccgagatcgtgccactgcactccagccttggcaagagagagagactccgtctcaaaaaataaaataaaataaaatatctgatatgtcagatggtagctttaaatgctgaagagaagctgggcacagtggctcacatctgtaatcctagcactttgggaggccaaggctgaaggatggcctgaacctcctggtcttgagtttgagaccagcctgggcaacacagtgagatcccaactgtacaaaaaattaatcatgtttctaaattaaattttaaaaaactgaatgcggccgggtgcggtggttcacgcctgtaatcccagcactttgggaggccaaggcaggtggatcacctgaggtcaggggttcgagacaagcctgaccaacatggtgaaaccctgtctctactaaaaaatacaaaaattagccaggcatggtggtgtgcgcctataatcccagctactaggggggctgaggcaggagaatcgcttgaacccaggaggtggaggttgcagtgagccgagatcacgccattgcactccagcctgggcgacagagctagactccgtctccaaaatcaaacaaacaaaccaaaggctgggcgtggtggctcatgcctgtaatcccagcttttttggaggctaaggtgggtggattcctgaggtcaggagttcaagaccatcctggccaacatggtgaaacctcatctctattaaaaatacaaaaaaattagccgggcatggtggtatatgcctgtaatcccagctactggggaggccgaggcatgagaattgcttgaacctggtgggcagaggttgcagtgagctgagatcgtgccactgaactccaaactgggtgacagagcgagactccagctcaaaataaataaataaataaaaataataaaataaaataaaacaatgacctcgcctagcagagggtgagtgctccagcaccctcagctgtccctgtccttttttttttttttttttttttttttgcgacggagtctcgctttgttgcccaggctggagtgtaatggcgccatctcagctcactgccacctccgcctcccgggttcaagagatctcagcctcccgagtagctgggattacaggcgcccgccaccacgtccggctgatttttgtatttttggtagagacggggtttcaccatgttggccaggctagtcttgaactcctgacctcaggtcatctgcccgcttcggcctcccaaagtgctggaattacagacgtgagccaccgctccaggcctgtccctgtccttatttgtggtccctgttcttccagggtcctgagctcaggcccccccggactgcgggtatccccggggagggcacagctggccctggcagggcccggacacctggggcccgacccacccctgcgcaccccgcggtgtcgccttcccgggaggctcgggttcccagatccccttacccgggcgtctcggctgtcgcgccctgggccgggggaggggaggctgcaggaagcggcggatccggcggcggcggcgagggcccgggtgggtggccgaacttctcccgccatggagggagcagcggcccgggaggcccgggggaccgagaccccgcgcgcgtctgcgcccccgcccgcgccctcggagcccccggccgcgccccgcgcccgcccgcgcctcgtcttccgcacgcagctggcgcacgggagccccacgggcaagatcgagggcttcaccaacgtccgcgagctgtacgccaagatcgccgaagccttcgggatcgcgcccaccgaggtaaggagcccggacaccggcgcccaagaccacccgcctgatggggtgaggggtagggagcttggaccctggacgggagaccccagatccccggatcccagacgtcggggtggccgcctaatcgccggatctcagagacccagccctcagatcccggggtgccacactcccaggggccccctttgcacgctctgcgcaaaagatgggcaggtcttaggactagcggacccctagatattccagaaaatcctctgcgcagacctagcttggagcggaccccagccctcggggaagcgcctctgtgcttcctgggcgtagctggggtctggggttccagatggcccccttagggatgggaagtttgaggccgccgtggggttggggggttcctgggcgtttttccaatccgggttcgtttggtttgcagcccccagggggcgccagcagattaaacctggaggtctgggggctggaggtcccggggtatggagaggggtctccacctgctggaagtctccttctccctcctctctctgttctgggggtcccacgccctgccctttcccatgggctgggatcctggtcgctgggggcaggggcctgcgcagacagggtggctgcgtggggggatgcatgccctggctaactctaggctccttctcccccgggaagattttattctgcaccctcaacagccacaaagtggacatgcagaagctcctggggggtcagataggcctggaggacttcatctttgcccacgtgcgaggcgagaccaaggaggtggaggtcactaagacagaggatgctctggggctgaccatcacggacaacggggctggctacgccttcatcaaggtgcccgggagggggtgggcgggtggcttcctggggtccagcaactgccccccccactctgggtcgacgtgggttctgcggattggaggcgggtggctggggttgccctgccagcgacgctggatccctgcagagaatcaaggaaggcagtatcatcaaccggatcgaggcagtgtgcgtgggtgacagcatcgaagccatcaacgaccactccattgtgggctgccgccactacgaggtggccaagatgctccgggagctgcccaagtcccagcccttcaccctgcgcctggtgcagcccaagagggccttcggtgaggcgggtgggctggcgggagctcttcccgaagtgcgttctacggatgcctggggtggaggagggtcggggatgggacgggctggaaggttctaggtgcacccgctgcgtgccaaggagctcctggcagggtatcagaaactcgtaggtagtttctattaatagattgttatggagtcagcctgtgggggaggggtgggggagagactgggtaaagtggagttggaggaggacgcgtccagaaccactttggagccaggctgggagacttgtttttgtttgtttgtttgtttgtttgtttttgagacggagtctcactctgttgcctgggctggagtgcaatggcgcgatctcagctcactgcaatctccacctcccgggttcaagcgattctcctgcctcagcctcccgagtagctgggactacaggcacccaccattgcgcctggctaatttttgtatttttagtagagacggggtttcaccatcttgaccagtctggtctcgaacttctgacctcaagtgctccacccgcctcagtctcccaaaatgctaggattataggcgtgagccaccgcgcgcagcctgggaacttttaaagcagtgctttgaggtcatggtggattgtagagaatgagaatatgagaaaaaagttttctttcttttcttttttttttcctttcttttttcttttcttttctttttttttttttgagacggagtctagctctgtcgcccagactgcagtgcagtggctagatttcagctcactgcaagctccgcctcccgggttcacaccattctcctgcctcagcctcccgagtagctgggactacaggcgcccgccaccacacccggctaattttttgtattttagtagagatgaggttttaccgtgttagccaggacggtctcgatctcctgacctcgtgatccgcccacctcggcctcccaaagtgctgcgattacaggtgtgagccaccgcgcctggccgtgccagctaatttttaatttttttctttttttgagacggagttttgctcttgttgcccaggctggagtgcaatggtgtgatctcggctcaccacaacctctgcctcccaggttcaagtgattctcctgcctcagcctcccaactagctgggattacaggcatgtgccaccatgcctggctaattttgtatttttagtagagatggggtttctccatgttggcaggctggtctcgaactcccgacctcaggtgatctgcccgcctcggcctccgaaagtgctggaattacaggcatgagccactgcaccctgcccattttttttcataactagactttctcaatgaagaaaacagtgtattgatttacacactagcacattctcctcatgtagccatgggttggccctttggatagcgttgttctatagaacagagacagagattctagaagtgccccagcacacatggagagacgtcccagggagagtgagctgtatggggttctagaatctgccctgccgtggctgtgaactccaaaagccatgcctaaaaatagagtttaggccgggcgtggtggctcacacctgtaatcccagcactttgagaggccaaggcaggtggatcacctgaggtcaggtgatccatcgtatcaaaaaaaaaaaaaaaaaaacctggctgggtgcagtggctcaagcctgtaatcccagtactttggaaggccaaggcgggtgcatcacgaggtcaggagttcgagaccagcctggccaatatggtgaaaccctgtctctactaaaaatacaaaaaattagctgggcatggtggcaggtgcctgtaatcccagctactcgagaggctgaggcaggagaatcgcttgaacctgggaggtggaggctgcagtaagccgagatcgtgccattgcactctagcctgggtgacagagcaagacaacatctcaaaaaaaaaaaaaaaaatcaagcttagtctgagactaaacccagctctagagcccaggccagctctcagaccaagccctgctcttaagcccaggccagctctgagactaagtgtgtttctagcacctcagtcctgacactaagccgggttctggaacccagacaagaacatatctagattgaggatcctaccacaaggagggtcccaagcagtcccttctagagaaagtcgctagaagagggagagtgagggcatggaactgggatgttagttctaaacctgctccattacaacacctcattctggacttgtgatttagtttgctggggatgcgaagtgtggaatctcgaataggtctctggagacttgccgtacagatgtaaggaggactttgaaggggaggaagattctagaaaggctcggctgttggcctcccagggtttacaaagatgtggctccacccagaacccatggccatccctcactctgttccctccagatatgattggccagagaagtcggtccagcaaatgtccagtagaggcgaaagtgaccagcgggagggagaccctgcggcttcgttctgggggggctgccacagtggaggaagcggtgagtgaaggggaggggctctccccaggcttctgcaccttcagctcctccactgagtcagtgcggtcttgggtaagaacttctcctcggagcctcagtttctctgcctgcaaaatgggtcctcattgaaaagtggggcaatgatgttggtaccagcactactgactcgtgtgagggtccagtctactcttcccttaggggtgggggtcgggagggggctgggctggagggctccaaagcttttcacccctgacttccctcccgtgtgcccccagcccagtgagtttgaggaggaggcatctcggaaggttgatgacctgctggaaagctacatgggcattcgggaccccgagctgggtaaggggccagggtaagccagggggccctggggggagggaagcctacgggaggaggcaggggtcccagcgggaagttgggcgcggggagtgccctcactgacatcccctctggcacggcccgcagcgtccaccatggtggagacgtccaagaagacagcgagcgcccaggagtttgcacgctgtttagactccgtcttgggcgagttcgccttccccgacgagtttgtggtggaagtgtgggccgccatcggcgaggccagagaggcctgtggctagtttgccctgggggggcccagcacagccccagcccggagcccagccccctgccccggccctgctccagaacccagcccagatcggaggacaagttcctctctagaacccaatccaatttggagccccagcccaactccagaacccaacccttctctagaatccagcccagatctgaggccaagctatgtgctagagcccaggccagctctgagaccaagcccagcattgagaataagctctgttctaaaactcaggccagccctgagaccaagcccagctctagaactcagatgagctttgagaccatgcccagcactgagaccaagccctgttctagaactcaggcctgctctgaggccaagcccagctctagaacccagatgagctctgagaccatgcccagctctagaactcagatgggctctgagaccatgcccagctctagaactcagatgggctctgagaccgagcccagctctagaactcagatgggctctgagaccgagcccagctctaaaactcagatgggctctgagaccatgcccagctctagaactcagatgggctctgagaccgagcccagctctagaactcagatgggctctgagaccgagcccagctctagaactcagatgggctctgagaccatgcccagctctagaactcagatgggctccgagaccaagcccagctctagaacccagatgagctctgagaccatgcccagctctagaactcagatgagctctgagacagagcccagtattgagaccaagccctgttctagagtccaggccagctccgagaccaagcccagctctagaacccagataagctctgaaaccaagcccagcatagagaccaagccgtgttctagaattcaggccacatctgaagccaagcccagctctagaactcaggtcagccctgagaccaagcccagctctagaacccagataagctctgaaaccaatcccagcattgagaccaagccctgttctagaactcaggccacctctgaggccaaacccagctctagaacccagataagatctgagaccaagccctgctctgaagcccaggccagctctgagacgaagcacatctctagaatccagctgagccctgacaacaagccaaactctggaacccagacacattttaagacccagaccagcttggagaccaatcccagttccagaatccaggctagctcggagaccaagccctgctggaaaactcaagctgactctggaactctggacagctccacgatgcagccacacctggacactcggtctagctccggaaccccagttaattttggaacccatgtgagattcatgaagcagcccagctctggaaccccagtcagctcaggattcagagacagctcccaaatcaaatcctattcaagaactcagaccagctcagaaacccaggtccacacggctgcccagtccagatcccaaccccagttgcatccaagtgcccatccccatcctgcagcccagtccagctccagtgatgattccagctctgagactgagcccagctctagaacctcgcctagtgctacaaccaggcccaactccaggattcagaccagctctggaaccccatccatcttggaagcaagacccagctccagcacacagcttggtgccaagccccactctccttgcacaatgcagctcagctctagaatgcagtttacttccaggacccagaccaatttcaaggcctggccaagctccagagctcaatccagcccaagcaccgcacccagctctggaactcagctcagttctggagcacaggctggttctgaaatcccagccagctccaaaacacagacagcagctgagacccagccaagttccagaatccagctaagctctggagtccaatctagtcctgggacccaggccatcgcagcaatagaattaagctccacagccctgtctagttccgacagcaggtccagctccaggacccagcgctgcccaggagctcgaccagcctctgggactcaattcgcctctaaaaccctgccaggttctagataccagctccagaccacagccccagacagctctggtattcaactggactttgggaagcagagcagttctgaaagtcagcttagctttggaactcagcccagctctgggacccagataagctcaagaattcaagccagctctggaagtcagcttagttcgggaacccagctgatttccggagcccaacccagctccagaactcagactagttctggaaaccagctcagctccgggacccagaccactgcaagaattcagctcagccctggagctcatcttagctccagaacccagtccagtcctgagaccaggctcagctctgaggctcagtccagctctggaacccagttcagttctgggattcagtttggctctgaaacccagaccggctcaagaattcagcccgactctggagcccaacttagttccagaacccagtccagctctgagaccgggctcagctctgaaacccagaccggctcaagaattcagcccagccctggagcccaccttagttctggaacccagcctgtttctggaacccaatccagttccagaactcacaccagttcaagaatctggctgagccctggaaatggaatctgcccacagacccctggccttgaccctagaatccagcttgaggcccctgccccagcccaacctcagcccccaggcccatcccccagagaccccaccccagcccctagcaaagacccccagcctctgcctcagccccatgatcaggtatgtggcatccaggccagccttggccccatcccaggcttaccccaagcctcctacctggccccacagtcacaggtctcctcaaccccccagaagccagccgtctctcccaagccccgggtgggaccccagaagtccaccccacccaccatatctgtcactcctagtcctgcccctagggcagccctcctgagttcccagctgtctgagtccccagctttggcgccagccctttgccccactctgggggagccaggagcccgcccttaccgcggggggccgtagcttggctgtgacttagccctggttcatgtggttctcgtcctctcctgtcccttccagcctggggcccccagaagcagcaagtgaccttatttctccagcaggcggtggtagggagtgtgcggtggtgaaaacaggggcttcaccggtcctggctcagatccaggtccttggagggaaaaggagggcaggagacgggttgcaccgcatgtaccctgagggctcatggtgaataaaggcaccttccatctctgcagcctggtgtgtcattttgggggaagtttgggggaatgcagagatgtggggctggggggctggctgaaactgtggcaacactgaatacctcttgagcacctactgtgtaccaggcacttcattaagcaccgcacaggcatgagcttacgtgcctgcaggcgacaggtgctccacgaagacccagccactggtcctttctaccaatatttattgagcacgtactatgtgcaaggtgctgtacagaacactgtggtgtttgaaaggttgctgggtgaacaagtgaacagtggaggaaacgggcatcactccacgcttttgcatctctctctctctttctctgttttatttatttacttatttacagatggagtcttactctgtcgcccaggctggagtgcagtggcatgatctcggctcactgcaacctctgcctcctgggttcaaccaattctcctgcctcagccttctgagtagctggcattacaggcgcccgccaccatgcctggctaattttttgtttgtttgtttgtttgtttgtttgttttttgagacagagttttgctcttgttgcccaggctggagtgcaatgacgtgatctcggctcactgcaacctccacctcccgggttcaagctattctcttgcttcagcctcccgcgtagctgggattacagacatgcgccaccacgcccggctaatttttttgtgtatttttagtagagacggggtttctccatgttggtcaggctggtctctaactcccgacctcaggtgatctgcccgtctcgacctcccaaagtgctgagactacaggcgtgagccaccgcgccctgcaatttttgtatttttagtagagacaggggttcaccatgttggccaggctggtctcgaacttctggcctcaagtgaccctcccgcttcggcctcccaaaatgctgggattacaggcatgaacaatcgcgcccggcccatttatatctacttttaatgacacacagattcaaaggtggtttgattgcaggttccagggctaacctgtagccctcccattacaggctgctggaagaattctaggtggtaccacccatcaagtgattaggaaacactcaagaaacaaggtgggggaggaaccgaatcctctatgtccctccccatccttcccagccctgccctcgtctgctccgggtgaggcccaatgcacaaactccagagattgaaaacttctggacccaaaggaaaataaaaccaaaggcagagatatattttggcaagaaaagggggtgcccccgttcacattcaatcctttctggacagagccttccctgttggaggttcaaaaggaagcaactgtaccccagcaagtaggtcaaattcagggtcaaagagcatgcaaggccgggcgcagtggcttacgcctgtaatcccagctgctcgggaggctgaggcacgagaatcgcttgaacccgggaggcggaggttgcagtgagccgagatcgtgccactgtactccaggctgggccacagagtgagactccgtctaaaaaaaaaaaaaaaaatggccaggtgtggtggttcatgcctgtgatcccagcactttgggaggctgaggctggtgaatcacctgaggtcaggagttcaagaccagcctggccaacacggtgaaaccccgtctctactaaaaatacaaaaattagccgggcgtggtggcgcgcgcctatagtcccagctactcaggaggctgaggcaggagaatcgcttgaacccgggaggtggaggttgcagtgagctgagattgcgccactgcactccagcctgggggacagagcaagactccgtctaaaaaaaaaaatagcaatgcaagaccctcttccaatgtctgcatgcccttcctggggttgggagggacgcagagaaggggtgggagctctggatgggaaaaaggggccgaggaagggagagtgcttggtaaaaggatcagggaggagttgggggtccccgggttggattggggtcaacccaaaaccctgctgctgatgcccactgtccatccagcacccccagcccctgaatcctcagaacaggcagatgggctgtccgaggggccaagggctccgcggaaaggcgcgggaggggcgctctgtccacttcctactgcagcccggagcgctgcgtgagctggggctggagggacagcgacctgggccgggtgctgaggcgaggctggagacgccggagcacggcgcggcggaacaggatatacacccaggggtccaggatctggttccaggtggccacgcgcaagtagatgagcagctccttctccgtggtgcgggacagctgcccggcggggctcatggcaggcgggtttcgcagcactgtctgggcgatgaagacctgcaaaggggagagctgtcagcctgggcccccgcctccagccccgcccgccccggtccctgcccggggtcccttgagatccagggtccactccgttttttaattttatttttgagacagggtctcactctgtcgtccaggctggagtgcagtggtgcgatctcagctcattgcaacctctgcctcccgggttcaagcaattctcctccctcagccttccaagtagctgggattacaggtggctgccaccacacctggctaatttttgtatttttcgtagagatgggggtttcaccatgttggccaggctggtctcgaactcctgacctcaggtgatccaccagcctcagcctcccagagtgctggaattacaggagtgagccactgcgcccggccagtgtccactctgttactgcattgctgggtgacctcaggagagttgactaaccgctctgagctccttttgatgggttcataaattagcgcactcttagccaggcagtggctcacgcctgtgatctcagcactttgggaggtaaataggagagaatcacttgagcccaggagttcaagaccagcctggggaacatagtgagacctcatgtctacaaaaagttaaaataaatagaaaagttacccaggcatggttgcactccagcctgggtgacagagcaagatcctgtctcaaaataaataaataaataccttttttttttttttgagacggagtctccgcctcctgggtttacgccattctcctgcctcagcctcccgagtagctgggactacaggcgcccaccaccacatccggctaattttttgtatttttagtagagacagggtttcactgtgtcagccaggatggtctcgatctcctgaccttgtgatctgccctcctcggcctcccaaagtgctgggattacaggtgtgagccaccacacctggccataaataaaatatttaaataataaaaattatatttatctataggtcaggattgatgggaaatttttttttttttttgagacggagtttcactcttgttgcccaggctggagtgaaatggcaggttctcggcttaccacaacctccgcctcctgggttcaagcgattctcctgcctcagcctcccgagtagctgggattacaggcatgcaccaccacatctggctgatttttttgtatttttagtagagacggggtttctccatgttggtcaggctagccttgaactcccgacctgaggtgatccacccgccttagcttcccaaagtgctgggattacaggcatgagccaccgcgcctggcaggaaatttttaaactatatttaaaaatatttaaaataagaatgttatctacaaattagtatataatatataataatcaattatatgataattattcataattataatgtggcctataattgatatatatcatatatcatacaattatattataattaaatgttacattatattaaaatactttgtttgagatcagcctgaccaacatggtcaaacaccatctctactaaaacatacaaaattagccgggtgtggtggtgcacacctgtagtcccagctactccggaggctgaagtgggaggatcccttgaacccaggaggcagaggttgcagtgagctaaaattgtgccactgcactccagcctgggtgacacatcgaaactccatcttaaaataaaataaaataatttggccgggtgcggtggctcacacctatactcccagcactttgggaggctgaagcgggcagatcacgaggtcaggagattgagaccatcctggctaacacgatgaaaccccgtctctactaaaaatacaaaaaaaattagccgggcatggtggcgggcgcctgtaatcccagctactcgggaggctgaggcaggtgaatcgcttgaacctgggaggcggagcttgcagtgagctgagatcgcaccactgcactccagcccgggcaacagtgcgagactccatctctaaataaattaaatcaatcaatcaatcaaatcatttcctgagcagtaggtcctgtaggctgaatgaagcagcaacagcagctgaggaactcccagggcgcaccctcataggctcacagtccagtcgggagacggaaactgggtccggggagttacagcatggggtgggcaaagctgtgaggaggaagcaatgtcagagcccagaagaggtgcctgacctggcctagggaagtcactgaagggcaaatgggagtgggcaaggtgcgtctgcaggaagtgcctgtgagaactttcttctgagggcaacagggagccatgggagggtttagagcaagggttgacccatgggccaaatctggcctgccacttgctttgggttttttttcttttcttttctttctttctttcttttcttttcttttttttttttttttttgagacagagtcttgctctgtcacccaggctggagtgcagtggcacaatcttggctcactgcaacctccacctcctgggctcaagcaattctcatgcctcagcctcctgagtagctgggactacaggagtgtgccatcatggttagttaattttttttagttttagtagagatggggtttcaacatgtaggccaggctggtcttgaactcctgacctcaggtgatccgcctgtctcggcctctcaaagcgctgggattacagacatgagccaccgtggctggcctgtttttgtttgtttgtttgtttttgtttttgtttgaggcggagtctcgctctgtcacccaggctggagtgcagtgacgtgatctcggctcactgcaacttccgcctcctgggttcaagcgattctcttgcctcagcctcccaagtagctgggactacaggcgtgcgccaccacgcccggctaattttttgtatttttagtagagacggggtttcaccatgttggccagcatggtctccatctcttgacctcatgatctgcccgcctctgcctcacaaagtgctgggatttcaggcatgagccactacgcccggcctgttttgttttttactaagaatttctttccatgtttaaatggttagaggaaaacaaaatagaggcaaaaattgagtgacataaaaatgacatgaaattcaaatttcatcatctatccatcagtagttttattggccacagccacgcctactcatttatgtgttttctacggctgctttctattttttttctttttttttaatttggaggcagggtctcactctgtcacctaggctggagtgcagtggtgcaatcatagctcactgcagcctcaacctcccaggctccagcaatcctcctgccttgacctctcaaagtgctgggattgcaggcacatgccaccatgtctggctaatttttttattttttatttttttttttgagacggagtctcgctctgtcgcccaggctggagtgcagtggcgcaatctctgctcactgcaagctccgcctcctgggttcatgccattctcctgcctcagcctccagagtagctgggactacaggtgcctgccaccacgcctggctaatttttttgcatttttagtagagacagtgtttcaccgtgttggccagaatggtctcgatctcctgacctcatgatccgcccgcctcggcctcccaaagtgctgggattacaggcgtgagccaccacgcctggccttaatttttgtatttttagtagagacagggtttcaccatgttggccaggctggtctcggactcctggcctcaagcgatcctcccgcctcagcctcccagagttctgggattaccggcgtgagccaccgcgcccggtcccaccatcaggatctaaatccaccctgggtgaccagaggtccagtcaggagggtagcaggaccccgcagagcccctactcaccagaaggggcagccaacacacgctggccaccaccatgatccccaggagctgagccatcatctccacctcggagtcccggggacgctgctgggccgcctcctgcccgtggtagacgtggcacagggtggccacgctgaccgtgttcagcaggaaggacagcccgaccgagaggccgcccagcatggagaagagcagcccgaaggccacgtccccggactcggcgcccagcgtcaggaagcaccaggaccccgggtattgcacggtgtagcgacccacgcccagcaggggcagcaggcccagcgccagcgcggccgcccacaccagccccacggtggcccaggcgcggcgctgcgaggcgaccgccgggcgcgagaagggccgggtgatacccaggtagcgctctgaggccatggcggcccccagcagcagcggggacaggccgaagaagatcatgacgacgcccatgaagcgacagagacggcagccagggtccacggcgtgccactcgaagagcgcggcgtgctgggacaccacgatggtaccggtcaccagcagccccaggaagtcggtgaggacgaggccgcagaggaaggtgaggaaggaggagcgcgtgtgcgaacccccctgccgcgcgcccgccagcacgctcagggccagcaggttggaggccaggcccaccacgcagaaggaggcggcgaaccagggcgaggcgatcagccgtctctcctccagggtaatgtttgtgggccggaaacagggccccagggaactgccgttgggccacatggctccggagccctgagggatcagtcaccaccccatcaggccgatgctgcagacagggcaggctggcactggttcaggcacacctgggaggcgagagaagatttgcttgtgattaattctgcatttcagtgtaagtagctctggtgaactcctacacaaccttcaatgccccagctcaaatatcctctccggttttttttttttttttttttgagacagagtcttgctctgtcacccaggctggagtgcagtgatgcaatcaaggctcactgcagcctcgaccttctggacccaagtgatccccccatctcagcctcccaaatagctgggactacaggcacataccctgtagtaagtagtcctcccgcctcggcctcccaaagtgctgggattacaggcgtgagccaccgtgcccggccttttcctccattttcatggtgtcggttttataataagaaataaaccctgaaatccagttctattttgggaacaaaaaacacttcttcggaatggcaggttccccagggatggttggtagagagcagcaggcggggacctgttactctgtgtggggctaacgctcagccacaatgcacaacaaaatcggagccaagccaggcgcagtggctcacgcctcttatcccagcactttgggaggccaaagtgggcggatcacttgaggtcaggagttcaagaccatcctggccaacatagcgagaccctatctcttaaaatatatatatatctgggtgtagtggtatgcacctgtaatccctgctacttgggaggctgaggttggaggattgcttgagccccagatgttgaggctgcagtgagctacaattgtgccactgcactccggcctgggcaacagtgagaccctgtctcaaaaaaaaaaaaaccaaccaaccaacaaacaaaaacgctaaaaaccccaaaaaacaaaaaaatggggccaggtgtgatgagtgaagtaaaaataaaatgagatggttcaaaaaccagcttctggctgggtgcagtggctaatgcctgtaatcccagcactttgggaggttgaggtgggtggatcatctgaggtcaggagttcgaaaccagcctagccaacatggtgaaaccccatcttcactaaaaatacaaaaagtagccaggcatggtggcgggcgcctgtaatcccagctactcaagagactgaggcagaagaaatgcttgaacccgggaggcagaggttgcagtgagccgagatcgcactactgcactccagcctggacaacagagcgagactccatctcaagaaaacaaaacggccaggtgcggtggctcacgcctgtaatcccagcactttgggaggccgaggcgggcggatcacgaggtcaggagatcgagaccatcctggctaacacagtgaaaccctgtctctactaaaaatacaaaaaattagccgggcgtggtggcgggagcctgtagtcccagctactcgggaggctgaggcaggagaatagcgtgaacctgggaggaggagcttgcagtgagctgagatcgtgccactgcactgcagcctgggtgacagagcgagactccgtctaaaaaacaaaacaaaacaaaaccagctccccataccccatgggtcatgtcaaagtccagagggttgtggctggttgtaaagtcacccaggaggctaggatggaacccgggtctcctgcctcttgccctgacacacccccaagtcacctggagggactgggtgggcaaaggtgggcgaatgggactgtgtgcgagatggaggtgccaggcagttaaggctcaaaaggtcctattacggtcaggcgtggtggctcacgcctgtaatcccagcactttgggaagccaaggagggcggatcacctgaagtcaggagtttgagaccagccggaccaacatggtgaaaccgcatctcaactaataaaaatacaaaaattagccgggtgtggtggtgcatacctgtaatcccagctactcgggaggctgaggcaggagaatcgcttgaacccgacaggggaagtgatgtttgtgggccggaaacagggccccagagccaagatcgtgccactgaaccaacctgagcaacaagagcaaaactccgtctcaaaaaaaaaaaaaaaagaaaaagaaaagaaaagagggaggcccaggtgggcggatcacgaggtcaggagatcgagaccatcctggctaacacggtgaaaccccgtctctactaaaaatacaaaaaattagccaggcgtggtggcgggcgcccgtagtcccagctacttgggaggctgaggcaggagaatggtgtgaacccgggaggtggagcttgcagtgagctgagatcgcgccactgccctccagcctgggcgacagagcgagactccatctcaaaaaaaaaaaaaaagtcggggttgctgatgacgggagtgaagggatccacgcgcagcactcagcacagcacagcgggcactcaatgcatgctggccctgaggcagggcctgggctgtggggtcgcagcagctaacgcattccagggcggtcaaatgggtgactgtggccctcactccccatctcacttgtgacgctttggcctggcttctggccttggctacgctgtatccagcctcataaattatccagctcctgacagcggcactgaactcccttcctgggaagacagctaaggccactgccaccgtggtgggaggcagggcttccagaggagaaactgaggcctggagagcagatgcggtggggggttcctcgcggcctctggcgatcgttgccctccactccgggctgctttggcgcctggggtttggattcctgcactgggatttcccctgggacaaggcgttcctccctcgagagctggtatgtgctgtttctggacattccttgggactcggctgtccctgcggccactgacccgacctctgcctggagcaacttccagtccctcctgggtctcagggtctcctcgaccacactccactccactcaccgggggtcacacacccggaactccctcacacctccggtggctgggagcaaatgcatggcccagagcccttggcccaggggagcctggaaactggcactgagtccttctggccacagctggctgtttccaatccccccacctccactccccaccctggcttcaggcgatggcagccatctcaagttctccaggcaaggatgccaatggggggaccgggcagggcctcccttccctcctgcattggccaggaggggtagcaggggcccccacgcggtggggcagtagagcagcactgcggctcttgggaaaattactgtccctccctgtgtctggggagaggtgtggacccaagatcgcttttcgatgttgaataactccagaattttgcagtctgagagcagacgtttgccctcagcgggttcagggttgtggaattctaacacgcttccagtcctgggacgcagaaggcctcacaattctagaatcccaagaggctgaggtcctgcaactcccaagaggctgaggtcctgcaactttgatgggaatctgcctgggtcccgggttccagaaatctctgtcttaattcctggcttctttctggaaggcggacagtgagttctccctcatccgatgccacccctgacagggtatccggcttgcaggtcgtgtgactcggagggctctgtccggcgctgtttccagaggcccgggcgctgggctgggcgtgggcaccaggcctggctgccccaagcctggttgccagtggaatgtgatccttggttcccaaacagcaggcctctcctccgccccatgttccatcctcgtgccccctcccccactccctggagcacgtcacctcatcatccatccatttctcaacaagtcccctctcctcagcaccccaccctgcccgccccgcctgcctgtcacggcctgagcccaccccacctcccccagacaggcttggaggctctagtccctgatctgccgtggccaggctggggctccaccttgccgagcctcagtttccccgctctgtgcaatgggggtgagcttctgatctccatgcctgcgggtgctaagctcaggcctccctggctctcacctctgcagggctcctggctgtactcacagctcaactccctacaaggtgcccgggcagccagcagggagccctgaggctccgtgtcacccctgtcggccttggaccttggacccacagggcccttttgggactgaaacttcagggaccggccagaccctcccatgcctgctgtagatctgaacgctcatgggcgtggacccccacatggtagcggaggcagacacactccacaccctgatgggcccacctcccctcatcgcaaagctccatttccgagaacatttcctgtttgtgacaccaacagggtccccagcccacacagtgcagggcggggactcccccagccagccagactccggccagccttgttggggccctaagtcacatggccccctgtgagcctcgctttccccatctctctagtgggggctccccagggagcatgtacggagctccgtcacacaggggccagcagggaccagggggcgggacccgggaggtgcagctggtggttaatggtggaccacaagttacagtgattccaccaacatgcacctcaggccaccaccgtgtgtgcacactcgagacacacagacacagccagacacacacaggcagaaacacagcagacacacaggcagaaatgtgacagacagaaacacagcaggcagacgcacagacgtgcacagacacacacacagaaacatggcagacacacagacacacacacagatagaaacatgacagacacacaggcagaaatgtgacagaaacacagcagacagatgcacagacatgcacagacacacatacagaaacatggcagatacacagacacacacagatagacacacacagaaacaccacagacacacccagacagaaacatgacagacacacaggcagaaatgtgacagacagaaacacagtagacagacgcacaggcatgcacagacacacatacagaaacatggcaaatacatagacacatacagatagacacacacagatggaaacatgacagacacagacacacacaagcagaaacacaacagacacacagacacacgcagatagacacacacaagcagaaacacaacagacacacagccacacacagacacatacaggcagaaacacgacagacatagacacacacagatacacacataggcacacaggcagaaatgtgacagacacagacagaaaaacacagacacacaggcagaaacacaacaggtacatagatacagacagacacagaaagacacacagaagaacacacagtatttaacagtcacagactctcggcagaaacaaacacacggtcacacacacaaaaccaccacacacgcacagacacagacacacaaccagggccatgcatggttcactcccagagacaagatcacacacacagccgcacaaccacactcgatccctgccacacccagggcctgggccccctccccggctgcagccccctgagtctgggacccccattcacagccatgtggccccacagagaccagagagccccccggacagaatcagcctgggccgcacccagacccagccgcctgggcgcccagggcaggcctcagggcaccatgccacccgccgggccacacaggggacacctggcacctggccgctgtcaccgcgggctttgcgacacacccacagcagggcagggccagcgccggatgcgcccagcagcccgggctcacaccagagcagtgcatcccgccctaagccagcggggcgacctcaccttcagagacctcatctgcggggctcccacctggctggatcccgcgcccgggggtccgggcgccgtctggagctgagcaggcagatgtgcgggcgccgagggtggggcgagggctgggggcgggcagagggaggggaaggacgggctcgagcgggacctcccagggaaactgagtcagtctggctgtgaccaggggcgggcccagcagaggacccacacagatggagggcgtggcggcacaggacgccctggggtcgcggcctggaggggtccgcgggggctaagccgagctgggacgggtgggggccgctggcagcccgcggctcgctctctccgtccagtctctgtctcccgctgtctctcatcagccccgcccaccctgcgctggccacgcccctcgggcccgggcctggctgacttggagtcagtgggtgccccccgcacgccgggacaccctacagccttctggggaaggcggcgcccttgggacccccaggccaccggtggcagggatgcaatggcccgcgtaggggtggcaggggcgcttcctcgggagcctcagcccctccagccgcccagcgccctgccaggcctcttcccggcgctcccgccgccaggcccgcattattcaccatctgggcagcacccaaggcctggagggggcggggcaggtccaggcggatcggctcccgggggtcgcccagactccagggctccaaattcactgggtgcgctggaacgcggcacacagtagtagtatgccctgcttaatacatacaggacatatttgaggccccttccaggggtggggtgggaggacagagggatggggggtgcaccagacgacacagccagactgagaaaggtggtcccagagcaggtgagccgggagggctggggtgatggcatcgcatgggagggtctcttgaggaggctcggaggtggctttggagccagaggaggaacagtctggagccgggaggctgcagtgggggatgggcactctttcctggccaccccccagctcgggctggggaaggagggatggagcccaacaggaatggctgagaaggtgccggacgcagggactgggaccgtctctttgcagaggggggaccttgggcttccttggccttgtttgtacacccgagccggacagaaccttgagttagggacctggagtgggaccggacaagctgaccttgccctgactgcaccccaccccgtcccctgggcccgggagggctgctagtccaggctgtgagtgaggggtattcccagcctggcccggccctctcgtcagcccagtccggaagccccttccccggctaccccgcccactatccttcctcctcctggccttcggccacacccaacctccctcccaaagctctatcccattaagtcaccagccatttaacacaacttctctctttcctggcaaggaggctatccaactcctatggatgtggcaaaaccctggctccaaggctgctttcccgtgaagccgacctaatctccaagtcttactctccccaacccctctctgtgttcagcttatacagtgggacaattatgagctccaagtgagacctgaaaccaggcctgcccttcaggatgccctaggctggagaatgaactggacacaggctgttccagccccctggggtcagggctgggccaaaggaagagacagggcctagggaagcccagaggtgagctaggaagacatcttgtgaggagagggcatgggaagtggggttttgtaggatgaataggagctccccaggtctgggctacgtggcagtgacaggaattgcatgtataaagctttggaggcaagagagagcatgaggcccttgctacactaactgcaaggagggcagatgttgggggaggaggatgtggggctggggctccagatgagggggcagtgagagacggaggaaggctgtcctgtccccacttcctctgtcctcggccctgagataacaaggacaatgactcttctgggaaacagcctgggcagagttcagagaaggacacttgcatttagcttaagcctcaccacatctctgcaaggcagggggtaaagatactcttaaattttagagatggggaaactgaggcacaaagggggaacaatgccacgcccatgtgtgggattggaacatgagcactgggcttccctgtcatctggggctggttgctggtctcccggtcttggcccgccccccgccccccaccccccgccagcacttcgggttcaatgggagcacaggaggctctggtgggaggagttgtgaggggctggggggcagatggtgggaacagaggccaggctcaggatgtacccccgtggctgcggtttccggcgggggccgggcagggagcgtctattcttagctctggacacagccaaagtcaggaagctgggtgggggcgggggcagcttccaggacaccaggtggacctcgggccatggtggagagtcatggggtagatgggggggtggtgtgcagagcctacccctggcccccacctccagtctgcctgcagggtctcgacacccagctcggaggccctccccagctcacgcgccctccgtagctccctggtgcccagctcccctaggatctggctccttagcttggcctgagccctgtgtgccccctgccctgggcacacctgctgccctgtcctctgcaaggcagccgtcacccttctcggccagcagcccgtcttcccaggctcagtgcccgtgacccttcaggggtcccagggccccagctctgctccctccagactggggcccctggcaaaccatgtgtcttgccagttggaggacagccatctcccttggggtgcaaaaggaacgtgaggaggaggaagcaggatgctggggctgggggaatctctgcaggggcaggtggggaaactgaggcagggacggggtggtggtctgggattgggattctccagggtagagaaacccagcttctaatactggccctgccactttctgggctcaacaacgtgggcttttgtgagcctcagtttcccgagcagccaaatggaagtaaatactgtcacatagagctggtgggaggtctgggttaggcccagtacaggctgggctgcgccagccacgcacacacaacctgggctgtgactacagaacccggcctgtcccaaacaccactctgggctcaaaagtgccttctggtgttgaggatgtagaaagctgtgatcacgcccactgcactccagcctgtctcaaaaaaataaaaagtgccccccgagtccagcccggactcagccctgccccagcagcctgtcctgatcggcggtggagctggccaggaacccaggcaagaggctgcccagaggattctaagatggctctggccatctgccatcaacttgtgatgtctgctgaaggctgggctggggatggcagtgttgtgtgtgctgcaatgcgatttgggattctggagtaggctggtcagggtgggccagggtctgcggtgtggagagcggacgctgatcagatgcacttccctggccagttcccaagccctgtgccacagacttccgggatcctgttagaggtgggggctgggaggtgaccagtgccccaggggagtgcaggatctgccttgcacctctgcctactgcagtgaggacatttggggaggctcatcctgggcactgaagcacattgggcagcatccctggcctccactcactccacgccaggagcagccccaaggtgggaccaccacgaatgcccccaggcatggccaagcgctgcccccatgagagcctgggcccaggccagcagctgtgtccacccttgtaccctccctcctgtcgtctgggaaatggactgtcacccccactgtgggaggcaaggcagaggggtggggggcaaagacagatccgggcactaacacagctcccaagggaccaccgggccccagttgggtgccgtgttgtttcccaggctcttcccttgggacaaatgcgctgtgtcacaaatgccagcagcaactagggcagcgggtgtggggcgtcggacacgttacactctctgcatttctgcaaacctaagattattctaaaatacaacgtttattaaaaaaacatgcgatcttgccaataggccaattccatgagaacaaaagattttttttcccacctacaagtctttttagagaaacaaacggaactatttccagatgaggcggggtgtctgggaggggctgtgggtggtctggggctggtgactggtgaggttgggtggccctctgggggtccgggaggcactttccgttttgcttctgttggagatgttcccgtcggatgctgaagaacaagcctgccggctgggccactccgacctgggctgtggcacccgtgtggccctcggccctcctggcctgagaaaggggagtgagaaggagccactgtcctgatatgggcaaaactcggggtcactggtctcatgctccaaggccccgtgagcaggccaggtggggggatccctgggggaagcccctcacccttctccaacccccagccttcggggagcccctgccctccaggccctgtgctcagaggtggggggaggacggctcagtgacttttggttcccacgaccttgacagagacagggacctcgacgcatcctccatacccgctgcggggaaatggaccccaccagccagcacggggtgagttgggggccagtccctgcagagtgtgggtgtccacagagggtctcttctgcagtggcggatcgggcgccagcagggtcccggcctcagtgctgcctgtgcgggcgagggtggcctgtgggcagggctggagctgccccacagccgcgggctctgcctcacgcccagtgggtgccccgtgatgtggcagggctggccttgagtttcctgcttctcacgagcctggcaccgccaagcccaggcccctctggcccatctccacaacaccctgtgtggccgccacttggggcaggccctgtgggccccacccagcctggctgaggggcggtggagagtgtccgcctggacggtgaggtcagctggcggctgctggccaccctcgtgctcgaaagatgcccctagcgccccctccgttgcatcaggaccctaggccagcctgtcccagtgtctcctcagctcaccatggcaggctcaatggtgaccccccttttatataggaggaaactgaggcctggcgaaagaaagatgcggcctgaggtgggacgtgaacccgcggccctgcagcccagacagcggccccggagtgaccaccagcttcaccgaagcccctttactgtgcccccgaggacacctgcctgccgttccccagggccgtcaccgccgatagcggtagcgcttgaagtgaaaccacagctggaagatgccgttggcaaactggcagcggaagccgtggcggtgcgagtattcccactcgcggttgacgatcttgaaagcgatgtcctcgtagggcggccccgcgtggaagcgcaggatggcgaaatccttgttgtcggcgcaggcctccaggaagtactcgggcgtggagcgcttgtcgatgaggtcggggtagaagatgttgaacttgtatccctgcacgatcttgggcggtgggttgtcaaagtcgtagtgcgtctggttgtacttgttccactcgaagcccgtgtgcacgcggttgaagaagcgcggcttgcgtggccggtacttgtcggcccacaggtaggccttgccggtgagtggcatctccacgctgaactgcgcctcgtcctggcccatgccctccttggcccgccggaagaagatgtcctcggcgctctcgctggcgtctcctgcgggcgggacggcgttcacccgggcctcggcctccccctgggtcctggcctccctcctagcctctctggcaggggcggccgctggtgcctcccgcaaaaggaaaacaggctggggcgagctaaggcacatggggaggggacagggcctgggcgacccggagacccacaccatccgccccgagccccggaccttggtcttcatgtctatcgtcctcctgggtggggaccaagcgcagcgcgcttccccgccgagcgacaggagaacctggtggttagggcctggctgcgggatccagccccacgcatgacccccgagggggtcctggcccaggggttttctgaagccagtattttctcctctgtcttaggacggaggctgcccagggagtgctcggacagcggccggtaaaagcttccaccacctgtggccccaaggccagtgggccagcaagcccaggatgaatgaaggaacgccccagtgcgcgtgcaggtgacggaatgcacgctcagagacccgggggagaagcagcaagcagctccccactgacgccagcggcttcggccgggaaatgaggctggagaagccccgcccccagctcgccccactggccccaccccctggcctccagccccgcccttacccgtgacctggagctgctggcgcgagagctgcaggcgctgcaggtcctcatccggttccagcacgtgcgcgtccagtggcagctcgtgcgccgtgagcagccgcgggctgtacctgccggcgtcgtagtcgtccaggctctgctggatcaggtcctcctccatgagcaccgcctcgccctcgccctcgccctcaccgtccccgtcgccgtcgccctctgtcggggtcgcgccgtccacctcggcctccgcggggccgccctccgaggagggcccgggcggggtgggcgccgcgtcctcaggctccaggctgggaggagagagcgttggaggcgcggaggctgcccacggcccctccatcctgctccgcgtctgcatcggcgtccccggggtgccggccgggcctacctgcggctgggggactggggctcctgcttgaggatggggaacagcggctcgctctccacgccctgctcctgcttcagtttgtacagcttctgccgcagcacgtcctggtggcgctcacgcagcctgggacgcagagccggggtcacccgcatggaggcgaaggggctccgcgccccacccccaccgagattctcacgccccttattgctgcaaggaccctgagaaggtggcgagcagccacggctctggctgggacctttgcccaggcttggtcagttcagggtcaaggcttatgggagagaggacgagaggacgcaggtaccctggtgaaccatcccatggcagggagaggtgggtctctgtctcacgctgcagtctcagtgtcttgtggctggggctggccaggagaaggggcccagcaggacaccagccaacaagcatgataaatttagagacatttacaaattagcagaggagacatgtatttacacagcggtgccaaaaacactccagaaatctgtacacagccagaggccgggaggcagcagcgctgggagggcgcaggcctgggcgcaaggcagtggggacaggcaggccgcctgggggcttcctgtgatgccatggctgctggagcgcgccaggtactcgttaaagggcggaagctcctggggagccctgtgagaccaacagggctgactccaggtgagggcactggagcatcctggggccttcccgctagggcacgggactacgcgccccccggccccccttcgtcactcacaggctggccccggccagtcggcactttcctgcccctctccaccccacatggtcccaggaggaggcgagacccaccccacccaggactcaggagggggcgaaacccatcccacccggacggcaccaaccctggtacccgcacctagtgctcaccgggcccgtgccatgtgggcacgaagctgctgcaggaggctctcccagtagcccatgtccaggttggggccaccagcgcggattttgccctcgatgccctggaagatgacctgcagctggttgtatgtcttccccttgaacaccgactgcacatcagagctgacggaggcgttgaccccctcgcggcgctcacctgcagcggggtgggggcatgggggggcggttccacatttcctacgtgctcctccaccccatcagggcctcctcccctgccatgggggggtccccctcccctcctcttcccccacaggggtcccatccagtcccgccacctccctggtctcaggttgtccccaccctggccacagcggaggggagggggtgggcggaggttgggagccacgttaagatgcagttgctgaggccttgacctggaggcccaggcccccagcgtgggggaggccaggactggccctgagaatgcccctccccaggtgagtctgatatgtgggtctgggaaccctagttgtgggcccggcccaccaacctggcccaactctgccctggccttgggcagtccatgagggggttggggggtgtgctcggtagccaggctctctggaattcagatcttctctgccagcctgggctgtgtgactgtgggcaagtggcctgccctttctgggccttagtttccctctgtgaagcctagcaaagaaggccaccctgctggcccctggggaagtcctgggcccgccccaggacaaacagctccccaccgccgccccccatcctacatggagtctgtctggcatctaccactggcccaggggcccgaggctcaagtccctcctcgatagacggggaggctgctgagggcgggagtggggtgctgggaggctggagcctagcctgactccgcgtgctctgccccacaccacgtggcatcccggcggcctcagtgctgctctcaggccacttccacccaccccgctgggtctggcctcacctcgcaaccctgccccttgctgcccatgccgaacccctgccacctctgggcctttgcacgcactgtgcttcctgccagctacccatccttctctgtcccattcgcttcctgaattcctcgcatcctccatgctcagtgagaacatcccttccgccaggaagccctccctgaccatccagcgatggcagcttcccgaggcgggcaatggggctggctgctgctgttccctgtgccatgctgggcccacagggagcttggtgcatagctgctggtgacacactgggcgggggtgaccagtgcaggcaccctgctcgagacctgccttctccagtccccgctggcggacagagggtcaagaggcccacacctacaccacaggggactggatagagtctagacggacccgagtcccctccagccaatcacctgggaccctggaatcggcacccagagctgcagcccctttgctgggcgctaagtggcactggaatccgtggcagccccagccaagcacagcgcggccgtgcccagacaggcggggctaccacgaacactgaaacccaagcagaagagcccagccgcgaggctcccaggaagccaggccaggtgccgccaggtcagcgtctatagaaagccgggtctggacatgctgctgcatgtctggatgcctcccgaatgcccacaagggggcccgggggtttagggggtcccagcagctgctagaggctgggggtgcaggccaagggccctggggctgcgtgggggaaaggccaggccctacacagggtgggaggctaatgaagctgagctgggatgacacccgttttctactgcacaacctcctgtagggttagaacttcctagaaaaagctaggtgcaccaaaatctcacaagtcaccactaaagaacttattcatgtaaacggccgggcacgatggctcacgcctgtaatcccagcacttttggaggctgaggtgggtggatcacgaggtcaggagatcaagaccatcttggccaacatcgtgaaaccctgtctctactaaaatacaaaaaattagccaggtgtggtggtaggtgcctgtaatcccagctacttgggaggctgaggcaggggaattgcttgaacccaggaggcagaggttgcagtgacctgagaacacaccactgcactccagcctggcaagagagcaagacaccgtctcaaaaaacaaaaaaacttattcatgtaaccaaacaccacctgttccccaataacctacagaaataataaaaaaactttaattttgtaaaaattaaaaagaaaaagcatgcagtcactcatgcctttaatcctagcccttctggaggtgaggcaggaggattgcttgaggccaggagttcaagactagcctgggcaacacagtgagaccccatctctacaaaaaattttcagaagtggctgggcacagtggctcacttctgtaatcccagcactttgggaggctgaggtgggaggatcatgaggtcaagagattgagaccatcctggccaacatggtgaaaccctgtctccttaaaaatacaaaaattagctgggcgtgatggcgcgcgtctgtaatcccagctacttgggcagctgaggcaggagaatcgcttgaatctgggaggcagaggtcacagtgagcagagatcgcaccactgcactccagcctggtgacagagtgagactccttctcaaaaaataaaatagctgggtgtgatggtgagcgcctgtagtcccagcttctagggaggctgaggtgggaggatcacctgaacccaggaagtcgaggctacagtgagccttgatcgcgccactcaactctcgcctgggcgacagagcgagaccttgtctctgaaaaatgaaaagtaaaaggaaaaccccaattaatttaagaagatccaggacaggggctctgtgggtctccagggggacagcaaagtcaagacccctcggttccctactcctggaaaccatgttgaaaggagaatcagaaacaaactccctcggaagacaccaaagccacctggggtccccaactgtaacgcgtgaggggaaaggagggctgagcgacgtggtggaggcagaaggccatggaagggatgggagaggccggggcctagggcagtggggcacgctggaaacgcctcccaggcttataggagaggccgggcccagggcaacgctggaaacgcctcccagtcttacaggagagggcggggcctagggcaacgctggaaacgcctcccaggcttcctgcagccggtgggtagggtctgcggcttctgaaggaaaatgtactgcacccagaagtctttgcccagccccgctgccaccagcaggagcacaccaagacccttaacggacacacctctgatgctggagaactgccctgcctctctgaggttacgggagaatgtgccccacggaggagaccactggagggacaggatggctgagtgaactccacctccggggaacacaaagctccactgaaaaagaggaaagccacaggctctttcctaggaaggacctgccacagaccacgctgagggctgcaaatgacactgacccagcctcctgggatcctcggccaccatgatggcacccaaggcctgagagggagggcaggggaaggaccgggtctatcgacagggatgcgtggcccatgagagccaggcactgttacagcagccgctggggcgtggattttggcggggagggggcagggctgctgtggttggcttttagaccggggggggggggggtctcatctagggcaattctgcccccaggggactctgggcaacgtctggggacatctgcggttgtcaggactaggggtgctcctgaccctgggtggaggccagggacgttgctcagcacccagcagtgtccaggacggccccaccctagggaacggcccagcccgcatgtccgcagtgctcagggtagacgctttagagcatccccggtgaccatgtgtgtgcaaccacacggaggggggggaaacgtgattttaaaagcccatcaggttggaggggcacgaactgacgcacgggacaggtagcgccctgaagctgggctgcacggccttcaggccaggtggagcgagacttgctgtcaaacaggcagagccactgagagcactgaaacctgagcggaaagccccgtggctcccataaggccggcaccgccgagtcagcgttaacgggacgctgggtctggacgctgctggccctgcaccccagacagaggcccgccccactcatccctcccagggcctactgcccgctgctgccccctggtggctcggcccagaaggggaggccccagttggggaaaccgaggcctgcagagagcaccaggccccacagcaagtctgaggcttctgggtgaacactgtagcccccgcagctcccctggagcccaggcccatgcccgccgttacctggccccttgcccgaggcctccagcttgcggagcttggagatctcgtcctcggtgatggtggtcatgtcccgccagaagtcggcgttcttgccctgctccagctccatgtagacctgggggcagggggcaggggtcaggacacgggtgtggctggggtgggggtgagggtgcaggtcagaggagcatcgggtggggctgggtacctggatatcctccagcaggtcctccatgtcggccacggtgaggccgttgaggaacgtgtagggctcatgcatctccacggccagatcgtcatcctcagcgctgatgtacttggccagcaggtcgatgggcttggcccgcccgtcccggatgcggatcttggaactgtggggagcaggggaaggtggcatcagagcctgggctgtgccctccatgctaaagaccctgcccttggggtgaccacaccagtgggagccgaggaggggcctgacccgttgggggtggtcagggaaggcttcctggaggaggaggaggaggaggcataaggtagagtgagccgggtcagccaaagggcgcaggccagcagtgcagacaaagtgcaagcagcgtggacccggaggtgggccaggtgggaggggcttcctggagggcctctgggatgtgcccaggatggcggcttctatgtgggctgtgatggggaagagtggaggagctgaagcagaggcaggctgggggaccagagtagtcactgccttgcaaccacctcctcccccaggcagaccactcggggcagagagccgggtttctgttctgggcctgcaggggggtacgcgttgcaggcgggccctggtccaacccaagggaacccgtcaccagggaggcccgagctgggaggagcctgatgtcacccgccacggggcccaaggcaagcagggacaccccggagcctcagcttgtctgtaaaccaggcggatgggggtgccaccctcctgggtggagtgtgggagggacaactgcagtcagtgcaggactggcgtccagcatgcgtggggtgccgttcacctgggcccgtctcctctgcaccctgcccagcaggggagggcaggagacagaagccttgccgcccgggaaggggtcaggaagggaaggtcccaggaagtgccgtgtgggaccctgaagggtgggagagcagtggcttccagagtgacagccagtgcccggccctggctccaagtctgggtcggagggagggggaggccccagcgcaccgcagcttggcctgctggaggtggaagttgtcctcctgctcctcccatgtcttgaagtgctctgcctccttctcgcgctgcagcatctccagctcctgctcgcgcatggccttctcccgctcccgctccagccgcagctgcttcacctgcaggcacaggaggctgagggcagcggggaccgtgcggtctgcagggctgcggggggaggggctgtgatgatgggggcccagccttcacccagctgccctgggcacagggattggtccggagatgcctgggctggtggacagaccttgggaagggagagggccctcctgcccgagactcagcagctcagatcagctggggccctctcggccaccctgaagggagcatgtgggagtgaaggcccgaggccagcagagccgagaggtggagggaaacagtttcctggggccatggtctgagcccctggatccagccttacctgaagccagcccccaggacttcccacttaagcccctcaagtcctgccaaagggggcgggcctccaggccctggaaagggagggccctgcccagtgggctggcagggtgcctaccttctgcagctccagccggttgtcctcctggatcctcttgttccgctccttcagctccttctcctccaggtggctgatccccttcttctccagggcctggaagcaccaggcacacctgccctgagcacagacccgccccctcgcccccctcctcagctccttcgtccaagagattgaccagggcccttgttttgcagagagaggtgacctgccagcactgcacgtcttccaccccctccttaacactcctgaaacccagtgcatccaattcagtgcagacatggagcccccactgggagtgagatgtatgcaaagggtaagaaggggctaccccaactctcaacaggagggcctcactcggggccgccccaactcccaacaggagggccttgctcggggccaccccagcccccaacagaagagccttgctcggggcctgctgactcgctttacccgggagtctgagtgcttcggacgtgaaggccacgccctcagcaagtcagggtcccccactgcacgtgggacagggcaggaacagtgagtgggggcagcagcagctctgaaagcaaacctgtggggtcatggggccccgcccacacagcggggcacaggggtggccactgatgggcttgtcccagcctggagaccctcaaagctggcttcttccagcagctgtctgagagcctggcgcggagcccccacttcccgaccaccttcctcaggctcccggtgccccgtcgccatgagggggttccaggaacccctgccgcccagaacttgcctccagggacacaggctgcctggctggggaccacccccagacacccgggccactctgtggtctatccaacccagcctggggccgcttccacaggcgtcaacgatgaccacatcttcctcctccatggctgcccgcccagagctcacggtggtgcccagcacaccgcaggtgcacagcacatggtggcgatgaagtgccaggcagcagtgtgtgcctcaataaagaactctggggggtctggggagcaaggggccaggaaggggtctctcaagaggggatgtgtcagttgaggcctgacggaagagaacagccggggaaggggcagagcatgtccaggcaggggcgcggcagtgtgagggccccgaggcggaaggagctcgttgtgttctcagacgacatcgggcagaagccacctggagaccccacagctcccaactgcgcaaccggcgagcaggtgcagtcggcccagcccacacgttgcctgctccaccccctccacaagtggatgctgcttcagatgagctgtgtcccccacaggcacatccccgtctgaacccctgcagctgtaatcatgaccccatgtgaaatgaggtcttggccaggtatggtggctgacacctgtaatcccagcatattgggaggccaaggcgggcagatcacttgaggtcaggagttcgagaccagcctgaccaacatggttaaactctgtctactaaaaatacaaaaattagctgagtgtggtggcacccgcctgtaattccagctacttgggaggctggggcaggggaatcacttgaacccaggaagcggaggttgcagtgagccgagattgcgcctttgcattctagtctgggcaacagagtgagactccatctcaaaaaaaaaaaaaaaaaaaaagtgatgaggtcttgcagacgtaggtaagatgaggtcatcctggaggtggcgggccctcatccaatgcctggtgtcctcatgggaagaggaacatttacacacagacacacagagcagaaggccgtatggagacagagacgggaaggcagaccgccacacaacacaggaacaggccgggttctgcggctgcaagccagggagggcccaggaatcaccggccatgactggagctgggagaggcaggaggggcctcccctcggcccccagagggagtggggtcctgcccacacctgcccacgccttgattttggacttctggactccagaacgaagagatgataagttctgttgtcttatgccactggtgtgactggtggctaaatggcaggcgcagaacgaaagaaccagctcagacgacagagcgcctggaactgtggaaccctgtcctgggtacatgatgccaagagctggctctctagataggtttcaggttgggctggtgttcggggcaaagaatggctgaagcttacaccgcaagagacacagttaatggcaagaaaatgacggtgggctgggcgcagtggctcatgcctgtaatcccagaactctgggaggccgaggtgggaaaatcacttgagcttaggagttcgagaccagcctggccaacatagtgagactccatctttacaaaaaaataaaaaattagccgggcatggtggtggtgcctgtagtcccagcaagtcaaaacgctgaggtaggaggatcgcttgaggccaggaggtcaaggctgcagttagccacgatcacgccactgcactccagcctgggtgacagagcgagaccctgagtcaaaaaagaaagctggccgggcgtggtggctcacgcctgtaatcccagcactttgggaggccaaggcgggtggatcacaaggtcaggagatcgagaccatcctggctaacatggtgaaaccctgtctctactaaaaatacaaaaaattagccgggcgtggtagcgggcgcctgtagccccagctactcaggaggctgaggcaggagaatggcatgaacccgggaggtggagcttgcagtgagccgagatcacaccacttcactccagcctgggcgacagagcgagaccctgtgtcaaaaaagaaagctgatagcggcagaagcttgcttatgcgtgtgtgtgtaaaaccaactcttgcacgatcaagggcaggctgggagtgtctcaagtgttggggtctccagaaacagtggaaatgctacagggacagaggccaccacccggcggggcccaccttattccagatgaaggtgcccagcaggttgttgtctccgaaggggttgtcggtgttggtgtagcccatgtactcctcaccccagcccatcttctcccgcttcttgcgctccttggcctccttcttggccagccgccgtgcgcgcttctcctcgggcgtctcgaaggccttcatcagctcctcctgctgcttccgctcctcccgcagccgcagccgctcctgcaggctctgctgctggctcagggcagccgcggccgcccgggggctctgggatcgccctggagacgcggagctggatgctgaggagctaggagaccacgagcgtgcgcgccgtcgccggcgagcccactggccccgtgactgctcctctcctgagtccgactgagaggacccatctcttgagtgccacttgggccgcggggggctccggcttcgcatccctgagcgctgccaccgctcttcctctgaatctgacctgcggagaggaccatggatgcctgctcagtgcctgcagctgtcatctgctccacagatgcttactgggtgcccgtgggggagcaggcactgttctaggttctggggacacagcagtgacccaaataccgatggcttctgccttcctgggctcaccctctggtgggccccaacaaggaagacatcaacaaataaacacaccacgcaacactaggcagaggcagaagccacaaagagtagcaatgccgagcacaggggctggggctgcagggccgaggtcagagaggggctctctcaggagctgacactgagccaaggtctggagggagtggggaggcagcgatgggtggattcggagggagagtgctcgaggcagagcaagagcgagggcctagaggcaggcactgacctgccacattctaagaacaacaaggaggctgtatggctgagacagagtgtgggggagagggaggaggcgcgggcagggaggtggctggggctggtggcgcaggaattataagggtacgaaccaggggacccgaacacatttaggctgtcaagggagggcttcctagatggaagtggtatttgaactagtcccacaggatggacaggagttaacagagtagagcgcagggaatggaagatgcacaacctcaggggtggttcaggggcctttaattttatttattagagacaaggtctactagacacagagtctactagagacaaggtctatatttttatttattagagacagagtctccctctgtcacacaggctggagtgcatgatcagagctcactgcagccttgacctcctgggctcaagccatcctctcgcctcagcctcctgagtagcggggactacaggcacacaccaccacgcccaggtaactctttacatttttttgtacagaggggtcttgctatgttgcccaggctggtcttgaactcctgggctcaggcaagcctcctgtctcagcctcccaaagtgttgggattacagatgtgagccactgcgctcagtcacgtttaggggtctttgtacacagagaactgccaaatattttgttaaatgctctacccattaagctcatgtcaaaaaaatctaaactatgttgaaaccaatcattgcagagcccttaaatattggccacaagttcaactgaattttcgtgaacattaattctaattacatatctagagtggcaaattattgtgaataattccaataccagaaaatggtaggcgaaaaaacacaaagatgacattaacaagacttatgggcaggcgcggtggctcacgcctgtaatcccagcactttgggaggccgaggcgggcagatcacttgaggccaggagttcaagacctgcctggccaatatggagaaatcccagctctacgaaaaaattcaaaaattagctgggtgtggcaacaagcacctgtaaccccagctaccggggaggctgaggctgaagaatcgcttgaacccaggaggcagaggtaacagccgagatcgtgccactgcaccccagcctgggcgacagagcaagactccgtctcaaaaacaaacaaacaaaaaaaccaacaaccgatgagtgaacttggcccagagcggggcaagactggcctgagtgtcagccacgaaggggctgagccagcactggggccccggtctgggaatcagtccctgtccccattttggtttctctgtactggagccggctcaaggcaaatccgaccaagtgccccatctccagaagaaaaggaccatggggaagctgagattcaggcactaggaatcagctgtgagtcctgccagctgacaccgagtctttttccctcccacagcccacctccattagcaaatgttgtctcctctacttccagaatccctctgaaatctacgcactttgcccgctgtggttgactacagcctccctcccatcgagactgccatcatctactgtctggacaattgtgccgtcctactctgatgccgctcctgcctaccccgctccatcccttctccacctcaaagccagaaagtatgcagagttaagtcagtccacgtcactcccctacccaaactcctctcaagactctccatttccctccgactaatagccaagatctaatgtgctgagcacacagggctcgatatgatatgatctgatctctcgttacctccccgccgcctcgctcacccggctccgggctgtccctccaaccgcccggtcccctgcctggaacgcctctcgccttccttccgctgccaggttaattccaaccggtggtcaattgtccccttctctaggaagccctccccgagtaagtcgggggtttcccggttccccgggatctccaaccctcggtcgggcgctcctgaggtaggagccggatccccagcgctgctcccgcagcgaccccacctgcgctcccggctccgccgcctccgtctgcgccgtccctcgtcctcccggcgccgtcggtttcgccgcccatggctcctgctccgacttcggctcccgctctgactctgccgccttcggccccggcgacccgcggaccgcgagcgcgagcgtgtgtcccgacccatcggctgggccagtggccgcggcaccaacaccaatagccgaagcctgcgctgggggccttcctcgcccacggcgctctccaggctgccccgtttgcgcctgagccgggaaagagcaacccatcccgtcgccccagcccgcaaggactccgacaccccagactttccactacgtctgcaaatgtggaccgcgtgattgactccagtgggattgttgcctccagggtggcggagtctcctttcaggcagtgctggaggcagccctaggcgggtccccacgcctcagggggcctgagaaactgtgggcggggcaagggcaaactaggaaccttgtgcagggaggggcctgccgaggcgagaccaataagaagcgggtctaggtcggaagtagcgcttcattggcgtggccaggggcgtggccgaggagaggcgtgtccggggagcgaggtccccgaaaggcgaggaaccgggaaggtgttaggtgccaggcagctccagagggcagagggcgggcgcggggacagaaactgaaaagccttcttatgagagtcatcgttatgctccaccacctgccaatgaacacctatgtattttgggagttaagctttaaaaaaaaacaaaaactttgataactccctgtattcccccatcaacccattttagagacggggaaactgaggctcagagagggaaagtcactcttaacacttgccttctcaacccaggctgcccagctttgtggtgtgggtgctggggacccgtgggagggttgtgagcagggtttgggggacttgctgttgaaacaagtttggcgtgggaggacggacttcaggggcaaggctggaggccagagacctagaagacgctgatgtcccatcctgagctcccctagcccatggtggctgctaccaccaccccgtgcagttctaaccactcggggctgggaaggcctgtttatggaggatgatagtaatttaagctaacttttaaaatatttatcttggccgggcacggtggctcacgcctgtaaccccagcactttgagaggccgaggcgggcggatcacctgaggtcgggagttcaagaccagcctggccaatatggtgaaaccctatctctactaaataatacaaaaattagccgggtgtggtggcatgcacctgtgatcccagctacttgggaggttgaggcagggagaattgcttgaacctgggaggcggaggtcgcagtgagccgagatcgtgccactgcgctatggcctcggcgatagagcaagactccgtctcaaaaaaaaaaagaaaattaaaatgtttatcttgagtggggtgcagtggctcatgcctgtaatcccaacactttgggaggccgtggcaggtggatcttgaggtcaggagttcgagaccagcctgtccaacatggcgaaaccccgtctctactaaaaatacaaaaattagctgggcatggtggcatgcttgtaattccagctactcgggaggctgaggcagaagaatcgcttgaacccaggaggcagaggttcctgtgagttgagatcgcatcattgcactccaacctgggcgacagagcaagtccccgtctcaaataaataaataaataaataaataaataaataaaacgtttatcttggaatacaacttcataacatccccgtaaacgctggctttgtatgctttgcttggtgttaaggcaaggatggaaccttacagaggaagaagagaccatctcctgccgctctagatgatgaccttgccggtcctgagatgtgggttgtcatgctgatgggatggcccaaaacaaagcgaaggcctgaccctgtgcttcccaaaattcagatgcatccttgcagcacattaagagatcacttgcatgggccgggcgcggtggctcagtcctgtaatcccagcactttgagaggccaaggtgggtggatcacctgagttcaggagttcgagaccagccttgtcaacatggtgaaaccccacctctactaaaaatacaaaatttagccgggtgtagtgccaggcacctgtagtcccagctactcaggaggccgaggaagaattgcttgaacctgggaggcggaggttgcagtgagctgagatcgtaccattgcattccagcctgggtgacagagcgagactccatctcaaaaaaaaaaaacaaaaaaacaaaaaacaaacttaaaacaacgagatcacctccatgttcagtttataaaacagctgtgctgaaacgttccaacggctcccttacagacaggatcttactttttttttttttttttttttgagacattttcttgctctgtcgcccaggctggagtgcaggggcatgatctcagctcactgcaaactctgcctcccaggttggagcaattctctggcctcagcctcccgagtagctgggattacaggtgtgagccatcacgcctggccaggatcttgttttcaatgtagtttctcaacctgggagtccaagataaatgtgttcccttcaaggggtccaaacgtgactgaattggaaccgctctagcagaacaaatacaaactttggggggctgcaaagatgttggaaacaataaaatgttttctgagctgaactgggacctgaagaaggttcacagctggtaaggtgtttgggtcctattactggtatcagcatcaatctcacaaaggtttctctcttctctaagattcaaagtcagtcctcaggccaggcacggtggcttacgcctgtaatctcagcactttgggatgaggcgggtgggtcctttgaggtcaggagtttgagaccagcctggccaatgtggtgaaaccccgtctctactaaaaatacaaaaaaattagccaggtgtggtggcgggcgcctgtggtcccagctactcgggaggctgaggcaggagaatggcttgaacccgggaggcagaggttgcagtgagctgagatcactccactgcgctccagcctgggcaacagaacgagactccatctcaaaaaaaaaaaaaacaaaacacaggctgggtgcggtggctcacacctgtaatcccagcactttgggaggccgaggtgggcggatcacgaggtcaggagatcgagaccatcctggctaacatggtgaaaccctgcctctactaaaaataaaaaattagctgggcgtggtggcgggcgcctgtagtcccagctactcaggaggctgaggcaggagaatggtgtgaacccaggagacggagcttgcagtgagctgagattgcgccactgcactccagcctgggtggagagcgagactccatctcttaaaaagaaaacaaacaaacaaacaaaaacagaaaacaaaaaacacagaacaaagtcactcctcagactcccaaccagacctccggaacccacagaaaggcaaacaggcggatgcttattacccgatttattagagagatctctaaaaagacggggtgtggcgggggtaggtgggcgaggaacctgggatgcaaaccagtgtttggggccaggagtggctgtatggtttcagaggcgcccaccactctgggtttgagggacacagcaccctcgtctcggcgctttggattgtcacgcaccagaccacggggcggaggaatggagtggcatccctggggggagttaagacacacgaggtttgcagtttcattttgtttcagaatcagtttggccataaaaatgggactgggttggggacaggcggagcgattgaaccaccggagatgaggaggaggtggcaggcgcctctcctggggtggggactgagggctgtggagacagtaccatggtgaaggaccccatggcaatgggagtattgcactgagccaggtttcgggggaacggggacgtgtcgggatggcgtagggggacagagcctggcaggagacacatggaagtttccgccttgtcagtctcagagcaaacgccttttagtctttacagtacaggaatttggacactgcccacgttctcagtggacagcagccatcagaggtgacccaggaggggaagtgggcattggtcaccaaggtatttacagacttctatcatgggggacagcggggtgggtccagcagcctccctcgcgggggatctgagggagaccgagttcgctaaatattataaataggtcttgccgtcctcctgcccccgcccctcggcacagtcagtggagcacgtcagcctcggtttacagttctctgaaaaggaaccaaaaaacacaaccaacaccaagtatatctccaaaagggccttggagacaacacaagaatggaaatgaaatggtatccacagaggtttgcacatttctcctgcaaaggcgcgtcggccgggcactggtgtcccgtgtcactcagcggagggaggctgccctggacgcggtgccgcccgcccggggccacacctgctgctccgagtcaccccacaggctcttggcgtctctggtgccagggctctgggcagggcgactcgaggactccctgggaggactggtgtggcctctgggggttgggcctttgagatgacaatgcccctgtccctgctggccatccaggtcccagacaccccttctgacctctgcccctgcctccccggggggtgcctgctgggtgtccttcggagggacagggcgggggctgatgggtggatgcccggtgccagcagatgagcaccaggctgtgaactgaggccaaggtcgcttcccagggctggacagaccctctgagcacgcagggaggaccccacgtgggcttgtcctgatggatgctgggagccacgcggctggccggttcccgaggagggtcggcccctctcctgggcagagtggaggggctgctctcgtggagtgtgtgtcctcgctggggacctcggggatgggtccggcttctccacagcaggggccttccgggcgcagcgtgtgggctgtgcaggaggccgacgggacgtgaacagcgggtggcgtggcgtcatacggaggttgtaacagacaaaacacagagccctgcctgggaggttctccggccgtctcagaccccacaccaggctctgccaggtctggagaggaattcttcccaaaggtgcagcttccactccagctcctcacatcctgggcacatcttggaagtgggggattcccacagccatcaccaataagcccctctcaggggtcctggggaagggcagggtgggtgactctgccgagctctggcctccaaccagcaccctctgagcgcagcgggcccaggaagctgccccagggcagtctgggctgagtcccaccactgggagcgctgccctcttggagggtgatgagtcggaaacaaagtcttctctcccctcctcggagacatcacatcacttaaacaagaaagaggcggcggacatccacaccagtcctgaaggagactcctgtggagccgggcctggccccctaggccatgtctccacgtggagggggcggggagcctgaccttccgccctgagctggtctcctgtggcccaaggcccggcctcccgctctgtcctgccatggagaaaacgtctccgttgcctgggccctccatgccagttgctgagtggcctacgttggaagagaaggacaagtccccagccctgagctccgccagcgtgggtggcagcctggggaagaggaggcctggccctccagctgtggtgggtctggattggaggcgccagaggtttttgctcgaggggcacctgggaggtgggcgtcagggccccactgcggcgggaacatagctgctgagtggccgcagtgcttggcagggcgagggctgtccccacagtcgatgttcaggccagatgtcctgcactgaggcccccaaacccaagctgagggcaggagggtccgcttcccacgtggatggaggcagagttgctcgggaccccagccgtcccctctgcaggccgatggggcccccggggctcaggtccccagaggccaccgcgaacagcctggcttcttcctcaggacacaggcaggcacagcagagaaccaaagagtgcagtgggcaggggctcttctccctctggttggtttgtttgtgtcttttttgttcttttcctaaaacggcacacacgtgcttccgtctctgtgccaaataaggactcaaatgcgattggccgctcgggagggtgggtctcacaggggcaggctgccgaccggggtgccggggccctgggaggcttgtcggggaggggcccggccgtcggcatccgtgcagggggaggacgaggtccggtggggcggcgaggcgggcatctcccgagctctgggcctcagcggggtgggcagcgccttcgggggcagccggagcagaagtggagctcggctctgggtcgggggctgcatagaaattactgcaagagcaagaggacaggtgaaggtgggcggggcgagggcccaccccaggccccctgccagggactggcttccttgggccaacacaggccctgagacacttagcccacggccacctcagagccagagagcccagggtggagctctgggccacctgtgccctcccgccccgggcctcagtccctgcctatcccagtagctggggaccacgctcagtagaaccttggagcccacgggaccggcgggtgcacctgggctgcacttactgtgtcgctctcgccgtcggaggccgggggggcctgggcgctatagtggagcggggagtacacccagctcctctcatcggtgggctggcaggtgggcgcgcgtgcaggagggcgcggaagagcagggtgcgaggaggtgcaagagaggcagagggaggaaggaagagacaggagaacataaaagaggcgaatcccccatggaagacgaggggtggctcagcccagctgccctctctgacccggtggacttgctcccaacctggacgggcctggggcctcagctcagcttggcggggcggggcacggcgggcggcagaaagcagttagttcagtcgaggcagggcctgagatagcaggtgacagagccggcggaagcgggtgggggtcgcgacctggagcaccgagtgttcctcctcctcctcctcctccacagcccggccccaccacagcccccaatcctgcctgtgccacgggcaccagcgcacaggctcctggaagctctctatgggggtcctgggaggtcggggtgccggacctacttcccaacccagaagccttttgggacctgaatatatggctgcctgcgggcagggccagtcccctctgccagcacagacgtgctaggagagactgaggctcggaccacccaccctgcaagagccaggagacgccttcctgagcagcagggcagagtgagggccaagttcagggctaggcacaggcagggccgtgtgcagggacacggacagctcttcccagctgtgcctgcgtgaggggtcccaggtctgggtgggatctggggagggagggagggtgcgttcctccaacacctccgtcccgcctcctgaggagcccccaccccctcaagctccccctgcttctcctgcccctaggctgctctgctttctcagggctccagcctggccgccctgtcttccttgttgtgtcctcctctctctcgggcctctgtcaccaacccagccttcaacgcccctcccggcacagatgacctgcgaatttccaccaggcctggcctcggcctgaagtgccaggcctgaatacacacctgcctggccacgtccacctggcggccctcggcccctaaactcgccacagtcacaacccagtccatcaccccaagacccactgctcgtccttccagtcaggatgacgctgcccacctgctgcccaggccaacccatgcctctgccagctcccagttgcccagcctgggccagcaggggcctcccttgtgctccaggtgagcccagacctcacctgcaggagcactgcctctccctgcctcgggctctgcctccatgctccctctaaagggcccacctctgtgctcactccaccctgcccgatcctacagcttccacaagacccctgttcccgggccctgggcaccgagggcagcgcactcctgccctgcgaggccgcatcgcggaggactgactcctgcactgaggggccaggaccccagcgcaggccttgcctgttcctccagggtagcaaatgcagcctggaatccctgacgtgggaatggcaggtcaggtccacccaacgtcccttgagagcccggcatggggagcctatgtgggtgctcagtactgatttggtggctgcactgatggatcccatggggacttgaaaatgtggggccaaaacagggtccccacctgagccctgaaagaactggcccgcagggaggagggtggcagcagccacctcagagccgctctctgggaggggcatcccgggcacacacagcacgtgggcagggatgacagtatccttctgctacagcattagaaacggggatacaggccaggtgcaggagctcacgcctgtcatcccagcactttgggaggccaaggcaggtggatcacttgaggtcaggagttcaagaccagcctggccaatatggcgaaaccctatctctactaaaaatacaaagattaaggccgggcgtggtggctcacgcctgtaatcccagaactttgggaggccgaggtgggcagatacctgaggtcaggagttcgagaccagcctggccaacatggtaaaaccccatctcttactaaaaatacaaaaaattattggggcatggtggcaggagcctgtaatcccagcaactcgggaggctgaggcagaagaatcgcttgaacccaggccagaggttgcagtgagctgaaattgagccactgcattccagcctgggtgacagagtgagactccatctcaaaaaaaacaaacaaggctgggcgcggtggcttacgcctgtaatcccagcactttgggaggctgaggcgggcagatcacgaggtcaggagattgagaccatcctggtgaacacggtgaaacctcgtctctactaaaaatacaaaaaaattagccaggcatgatggcgggcgcctgtagtcccagctactcgggaggctgaggcaggagaatggcgtgaacccgggaggcggaacttgcagcgagccgagattgtgccactgcactccagcctgggcgacagaacgagactctgtctcaaaaaacaaacaaacaaaaaactcaaaattagccaggcatggtggcaggcgcctgtaatctcagctactcaggaggctgaggcaggataattgcttgtacctggggggtggaggttgcagtgagctgagatcatgccattgcactccagcctgggcgacagagcaagactccgtctcaaaaaatgaaaaaaaagaaagggcaggacaggtggcttccttgtcctgcaggagttggggggacagagagggacaccctcagccagcagctgggcagacaggggaagtggggggcagtagcagctgggacccagaaccgggtgaccccaggaagaccagaaccaagggcacagcctcttcagcactcaggccttggggtgctttcaatggctgccctgcctcccttctggcccccacacttccgcttctgctgtgcctgctgccgagaccaccctccccacgtctgccccttcaagtcaggtgtttttcaaagtccaagcacccccctccgtaggcggcctctgcgaactgctccctgcctatggtggggtggccagcagggccgctgggtctctccagtgctcctcctcccagcaggcccctctgggcagctcctggacgatctccggggcacggcttcgcggtggctggcttcccgctggctccgtgggacggagctgcctagagcagccggggaagtggtctccacctcttggggtcactccacagtgcctggcacacagaggtgctcggagaggtttgctgatgggcggggagtcacggcggcctcggcggaggctttgtctcgaggggacactcctgctttgggtctgcgccccgttctggctgtgcggtgctgggcaggtctcttaggctctctgggccccttgcttattggtcataatgacaacagcaggccctgaggatctcacagctacgtggggcccatgtggcgtcccagggggacctccttgagagcttggggatctggattttgactaaaccgtgtggtctcccaggctcccaggggagccgaggcctcagcgcctccatctgtgaggtgggtgtggagagaccatctcctccccgtctccatggccctgcggttcagagcccggccctgcagccactctgctgacctgtgcaacctcccctgtgcagccagcggggccacgggcagccaggtctgcacgagtgagaagcgtccacccaagacaccctgacacgagagggctgggtccaggggcagagaggggctcgctggggtctggccggggtccgaagcagaccctgggcctcagctgtgcacctggtgatggtgctgccctatggagcgcccggttcgacgtgggaccgaatgacattcccagtgacgcatgcagcccagcgcctggtccggggccagcgtggctgacctcaattgcagccgtgatttacccaaagcccttctggaaaacaactgacgtcagacactgagcttccggccggggacctgcggctccctgctgcccgaggggcactgccccttctccccagggtggccggctgcggtcacttacagtccccgaggcgctcagcgtcacggcccgcagtcggcgatggcggggagagtaaatccagtacctcccatccgtgaactggacggggcgggccgggtgggccggaggaggaaggaaaacagaggacagcggatgaggcggccacccccgtggtcgggtgggagaggcggagggaggtggcggggagcaggtggggacagctgactgccaagcagaaggtggggggtgccggggcaggggcaggaccgaggacccttctcccttctctgctgcccacctggcagggcatcaggacacagacacacagcacgacatggcccccaggccccccgtaccatccggagaccaggacgcgcacaaaccagtcccaggaaaaggggtgacgacgtgcggtgggtaggggcacaggcacgcggcccgtccctcccttctccagggccaggtgggtgcatggggaccccagaggcgccactggagacagagcaggggagttagttatgaagcagcgaggaggtgcccccacaacaggccctaaggcctggtgcccgtgcccagccctccttcccagggggtgcagggtgagaacaaaccatctgggaagtgggctgcagcctccggccctccctgtgacctggggctgcctgatctgagtgggaccactggggagtggagacgctgcctggacattccaggcctcgctggccgcccggcagccacctcacccagaccctggcaagggagagcagggatcccaggtccccagggccgggcagaccctgccctgcccagtagcagccacgagtccccagcccacggcgtgggagcgtgaagccctcctgccactgcccggtcccccggccctcctcaaggataagcccacctggccacgcccacggcaacagggagaaggtcctgccgccacagccctgtctggacgtctaggctgtcaaggacacaggacctcagcctgtgccagggcctcccgaggggccaagagtctgaggactccggacgacttccagggagacgggtggcacagaaggtgccgtgggcacaaggccggggaaggggacaggggtggctctggggcctcagaaaggcctggtttggaggagcttcccaccccatggggttagaccaggaagagaaggtgggtgtgaacgtggctggtgggtgcgtgtgggcgtgtcgtgagagtgctggctggtgagagagcatgtgggtgggtcgacagggcacactcacgtgcctgtgtgcaggtgtgtgtatgcggtgtgcacacggtggagcgtgtgtgagagagagtccggttgacgagccggcggcaggaggagcccggggcacttacaaagtagatgtcggtggcgggcgcgtcctcctcgtccgaggcctggctggcaggtgcgccctcctcgtctgaggcctggctggcagtttctacttcaacagcagcagaggcaccggccggggaagcctccaccctggggacaggagtagacagagggtcttgaccctcaggccccacacggagactccccgcgcccccactcaggacccaggcaggggcttcatacggtcatcacggagatgaaaagccaggcagctgaccacaggccgcgcgctcctgcgctgccatttatcgcaaatcagaacaaacctccccaagaagcccctcatgctggccccaggagtgacctggagtgacccgccagcccgctgacagctcggccctgccactcccagctcagacacacacacctgtgggcacgtgctggcctcaccctcaccggctgtgccaccctgggagggcctgttcctcctctgagcctcagtttcctcatctgtcaagtggggagagatggcacctagccgctgggatcagagcttcttccttctttcattgatttgttttttcagacaggccctggctccatcagccaggctggcgtgcagtgctgtcatcacggctcactacagcctccaccgcccgggctcaagcgatcctccaaccttggcctcccaagtagctgagactataggtgtgcactgctacacccaactaattttttttttttttttagagatggggtctcactatgttgcccaggctggtctccaactcatggggtcaagcgatcctcctgcctcagcctcctttaggagggatcacagacggaagcctccgagcccagcctctttgttcttttcactgagcacttactacatgccagggctggctcccgtgattaacccactgagtctatcatgggggatggagagggtgcggctactgcccctgtgttgcatttgcggaaacggaggcacggagaggaggtgaggaacggccttggccttggctatggccacacggtgcatcgtgttcatcccaggaatgaggctaaacatgccctcctgccatgtcggaggtacagttcctttcagcaaaacctgaaatttcacggtgcaaggtttggcaatggcaaagagttgacagtggcaggagcactgggtggaagataaacccccagggctttagttttgggtctacgctgctgtgagcgctaaaaaagctctcttggaacaaaaatacaaaagcatctcaggcaaaaatcattacaaaggcaagaagaatttggtaacagtgcaagcatgggattatacacaccagacagatgacagaaaagtaaaaacatacaggggccgccacggggctcacgcctgtcatcctagcactgtgggaggccgaggcgggaggatcacctgaggtcaggagttcgagaccagcctggtcaacatggtgaaaccccatctctactaaaaatacaaaaaaattagccgggcgtggtggtgcatgcctgtaatcccagctactcgggaggctgaggcaagagaatcacttgaacccaggaggtggaggttgcagtgagccgaaatcgtgccactgcactccagcctgggcaacagagcgagattctgtctcaaagaaaataataataacagcagctgacaccatatccccaaaagggccagaactattgtgtcctgtgttttttaaaaaaacagatatttcttttaagcctttttcttcaatacaaaaatcaataaaattaatcccagtactttgggaggccaaggtgggcagatcactcgaggtcagtttttttttttttaggtggagtcttgctctgtcgcttaggatggagtgcagtggtgcgatctcagctcactgcaaactctgcctcccgggttcacgccattctcctgcctcagcctcctaagtagctgggccgacaggtgtccaccaccacgcccggctaatttttgctattttttagtagagatggggtttcaccatgttagccaggatggtctcgatctcctgacctcgtgatccgcctgcctcagcctcccaaagtgctgggattacaggcatgagccaccgtgcctggccaaggtcaggagtttgagaccaagcctgcccagctggctgatgggagaaaccctgtctttactgaaaacacacacaaaaattagccatgcgtggtggtgggtgcctgtagtcccagctactcaggaggctgaggcaggagaatcacttgaacctgggagacggaggctgcagtgagccaagattgagccactgctctccagcctgggcaagagagcaatatcctgtctcacaaaaaaaatttaaaaaattaaaaataaaataaaattaaattaataaatactaaaaaggttaaaaaaaaattagttaaatacttggaagttcagagatgctcttacacaacccttagcccagggtctcttgcctgggccctgtggacactggaaccaggtccttctctggggtggggccatcccgggcactgcaggctgatgctgagcagcgtccctggcctccacccactccatgccaggagcaccccccagttctaacagtcacaaatgtccccaggcatcgcccagtgtcccctgggggctaggatcaccccggctagtcgagaaccactcccttcaatcaaaaaataaacttatgggaaaatccaccatctgtgaatacaacctagtaagaaagaactgcttcatgatgaaacctcggggtgctcttggctcctctgggcccgcagcaggtgggcgccccgacctcccgccgaggccgtgctcaccctgcgtcctcctctttggggaccacaatctccacgctgcacgcaggctccacctgcactgtaatctgctgcagatcctcttccgcgggtggctcctcctgcggcctgcaggcaatgggaggttgtgcctcggtttccctcctcacttcccccatcctacccccaggagtgcccagtgaactccagggccagtcccagaggggagttgggagcctcctgattgggtctgttctttctggctgtcactcccagcccggggactgtccacctgggtcccttggtgactgtggtgccagcagggcctggggtgtagcgggctctgggggcatatgagcaaatggcagccccgaccggtgtgggtgccacagaccctgcccaccctccaggcagtgcctgcacctggcagccgaggccctgacacaagtgactcagtgtcccggccgccgggcctggccatgtaacatgtctctccaaatggcacgctagactgcagggagggtcacatcccacccagggcaccaaggggtttctttcaccaggcggcagcgattaaaacacggttaagaaaagcaacaccgcgccactgccccagtgttcacaagagtgagaccccagggacctcgcaaatgtccccgagggctgggcacttaaagccaggtgcagtccatgggatggaaggacggcacgcaggcgtgacaggaacggcgcgcacccacccctgagatccccgtcagtcgagtgacaacagcaaggtgtgggcggcgtgcacgggtgtgcccatttgtgtcaaaataaaagggaaccacaagcctggtgcacgtctgctgtgttcccagaaagtatcttccaagagacaaaacccacagtcccagtggttgctcctggggaggggacaggccgtgggcaggagggggcgcatttcacgatattccctcttgtatcttgttttaagttaaaaaaaaaacttaatagaagaagaaataaggaaggatccacagaccagagctgccctggctctggctgtaagaaaaacaaagtggctggaagattgtgtgcggtgctagggccgagtgctacaatcttaaatctgtccccaggagagaatgggcagagagcagaggggctggggggcgggaaacggagctgggagctgtgcaggaggagctggtgagacccagggaaggaagggggttgggtctcacctgccatcctgtccagacgactgtgtgcgccgcctgcagagatacagcaaacacgtgacacccagaaagagagtggcccgcctgctcagtctacctgccttgcctacccgcctgcctacctgccccctggcagccctgcccacctgtacatatgctcctccctcccacacattggatgctccgcccccgcgcacccacatgcagtgtatgtacatccaccgtacatacgatgctccacccacatgcacagcggatgccccgcccacatgcagtgaatgccccgcccccacgcacagcggatgccccgcccacatgcactgcggatgcctcgcccacctgtaccgcggctgctccgacgtctccgagggggaccgctcaggaatggagagggatgtggatgacagagtcgtggcaatggaggctgtagtggcttcttcgaaagaaggtggcgtgcagggcaggaggtcgggccggcctgaggggagaggactgtgggcaccttgcggagcctccgagcccccaaacacacagtcgattctccctgaggcttggctcaccctgggaacccacagcccagtgcccgcccgcctcccagacactcccacctccccacacggcagggaaggacgacgttccccctcacacaaaggcttctgaccgctctcaaaatagaatccagacagcccagagggccctgtgcagcctggccccgtcccctctccactctccctccccgctgtcttcccctccactgctctcttcccctccccaccccccctcccttcccctccgcgctgcttggccacacgggctccttgctgttccctcagcaggtgtggtcctgccccagggcccttgcatggctatgtcccttccttcattccctagcctgggggctgcatgccttcgatggcatcctggtgcacctcagatgacagtggccgtgagagaaggcgggagctgtcaccaccccacctggtggagccttctatactcagctccccctgggctcttccctggggcggtcccagcagcccccactccctgggcaggcggccctgcagatccggagggggtggctgagcgatgggcactcaggatgaggcggcaccccacccacggggctgctgctggcaccccctgtagcgcccacaagcgcactctgccctctgcccctcaccttcgtcctccagcgtggggtagctgcgggccccccgcaggtcgtactgggcctcctcccgctcgctagggatctggctggccgagaaggcagcggtgggccccagcggtttcacagctagcaaggctccgccgcgccccttcttggagggcgaggacttcagggctgcagggaagggtgggggttggtgcttggggttgctgggggctcatagcaaagcccagacagggccgccgcccacatataccccacgtccctgtggcccaccagacccctaccggtccctgaggccaggaagcaccacaacctcttggtggaaaaccggggtctgcctggggagggactgcgagcccgagttccctgtcctgcccacccgactgtctctatgagacacactgggacctggcacagtgcctgcccctcctgggatcctgcagaccagtgactcccatctaatgagctggccagggatgcctgcaggcttcaaccccttctatgtgcggcccagcccgggcagggcccccactttcagatggacactgacagccttggggagcaccaggtgttgtggttagagaagcctgtggctcagcatgtagggcctgagcgcagatccaggctcacccgctggctgtgcggctcggtctctctgggccctgggggccgaccttagcggtggggtgaggtggggcaggtgatgtcccgcacagggccaggcctgtcctcagtgctgtgtgagctctgcctcctcaccaagctcttgtgacctctgcccccagaatgacccacacagctcctggtaaacagtaggtgctcagtttgccttgtgcagcttcctacaatcaccaaaggctggcaaacagccctggatgacggaatgatcctgtggcatcggtcccagagagtggggtgtggggacaggctcaacggctggctctctggagacagatcctgacacgtggtgtctgccaattcccacggtgttgatgagagggggtccctgacctcgaggccgtgagcaagtgtgcaggccgggaagagcagcctgcctgcaagcgctgggcactggcgtgcctgtccctgccacctccctgcaacccccgtgggtgcggacccgcagatcattcatgccccccaccagacacttcccaagcatctctgtgggccaggcctgtgcaggatgctggggagcccgggagccttctggtggggagggtggctgagaaacagaccccaggggggaatccatctggcagcaggttggccacgggctgaggtctgcacaggggcctggaacccagagtctgcgtccagatgctacagtggcccatgaggggaagctgagccctgagagatggggacctcccccgggcaccctgtgggtgaatcccgagtccccaccttccccaccactgtttgccctgggaccttcccgaccatgccctgctgggctagcctcctgcgttcccctgcccggggtgcgtttccttggcgatggtgatgctgtgggcagccccacacactgtgagctatctgctgagtcaggcccacccatcccatatataaacactgtaccctcacagtgctgtgccaatggggaaaccaaggcacagaggcaggtgcctgctcaaggccacatgggcaggacgaggccaggctaggattcaggctctggcggtggctccagacccgtgctctaccgctgtgcagagcaaatatcccgactaccctacctccggatgaggcccggtctgaggggggcacaggggctctgagtttactgccctgcccagggggctctcggcctcccgcagagtccctcctgccccacggcgctctgggccttccccagggtccctcccgccttgcggggctcaggtggcttacaggagttcttccgaaagaccgtgttgctcatgaacttgaaaaagcgctcggcatagaagctggggcggtggacggacaccgtgtcctggaagagagttggggggggtgcccgggggcagagggtgcatcaatcaacagctggggacagccccagacagacgctgtatgtgtgtggggggcaccttctgtgtgaaaaggctcgagatgggtccatggcgccatggcttcctgggaggggctcacggaacagggaacagtggctccctctggggagggagactgggtgccagggaatgggtggaggcttttccactagagacctgttagcatttttgactttttaaaccagctgaataaagtattccggccaggcacagtggcccacgtggacttgtaggggaggctgaggcaggatggcctggctggggccctgctgggatgtgatctcggcctcccagaatgcaacctcctttcccagcctccttgggtgaggagtggccacgtaccaggactgtgaacgactccacccccgcaggctgcagtgggaggtggtgcccggccactctgggccaggggacaaggacaaccccagggacatgcggcggcagcacaggacaccctggccagcctcgtcagagccgagacagcgctcctatctgccctgggcagcaggttccgggccttggcaaggtttaagacatccccagaggcctctgccagctgccatcctgacccgctcaaggcttattctggaagctcctgcctggaccttctacacgctcttttgaaaaatgggggtgcctgttgggatcttggattctacaggctgtggtcacacagacgttagtcctcagtgcctggccccaggcggtactctgcgtttgtggagtgacggatgggaggaaggctgggacgacagacaggaggacagagggaggaaggatgggaggaggggtgcaggcactcacagagggaggagggatgggaggaggggtgcaggcgctcacagggaggaaggatgggaggagggtgcaggcgctcacagagggaggagggatgggaggaggggtgcaggtgctcacagagggaggagggatgggaggagggtgcaggcgctcacagagggaggagggatggggggagggtgcaggcactcacagaggagggatgggaggagggtgcaggcactcacagaggagggatgggaggagggtgcaggcactcacaggaggaggagggatgggaggagggatgggaggagggtgcaggcactcacagagggaggagggatgggaggagggtgcaggcactcacaggaggaggagggatgggaggaggaatgggaggagggtgcaggcgctcaccccatcgtggacgagggccttccaggtgtgctccagtttcttgatgaacctgtggagagagcacccggagtggcagctgacatcagccaagcccatgccaggccacctcactcaggggccactgtgcaccccccaggacactgggccatggcctcaagcagtcgtggctgtcaaaactcagggtggcaggtgctcctggcagggagtgggtggaggctctctgctcagtaccctgcagggcccaggacggccccaccccagagaaccatctggtcccaatgtccatagtaccgagggggtgactgtttttaaacattctagagccccagctgagcacggtggctcacacctgtaatcccagcactttgggaggccaaggcaggcagatcacctgagatcaggagttcaagaccagcctggccaacatggtgaaaccccatctctactaaaaatacaaaaattagccgggcgtgctggcgcgtgccagtaatcccagctactggggaggctggggcaggagaatagggtcgactcagaaggcagaggttgcagtgagccaagatcgcaccaatgctcttcggcctgagtgacagagcgagactttgtcttaaaacaaacaaatgaaaaaccaaaaaacaaatattcgagccccaaagtgaggcctcaaacccactccttggattttcttttttctttttttttgggacagggtcttgctctgtcacccagcctggggtgcagtacggccatcatagctcactgctgcagccccagactcctgggcccaaggaatcctcctgcctcggcctcccaagtagctgggactgcaggagcaccaccacgctcagctaattttttgatattttgtagagatggggtcttgctatgttgcccaggctggtctcaaactcctgggctcaagcaatcctcccgcctcggcctcccacagtgctagattacaggtgtggaccactacgcccaactcactctagattttcaaggcgaccaaacaccttccctttagggctcaagaaggggcagccaagcaagagctttccaggttgaggaagccccgagagctgctggtgcggctgtttccacgggcaagcgcctctgtgcatgggtgtcctgggggcgcccatccacctgtgggactgcagacccaggcgcccacctgtggggctgcagacccgggcgcccacctgtggggctgcagacccgggcgcccacctgtgggactgcagacccggggcgtccacctgtaggactgcagacccgggcacccacctgtaggactgcaggatgtcgatgatgccaatgtgcagcagcagccgctccccgcggccgttcacagcggggatcccgcccatcctggggagagaggccgagggtaccatcagcatcccgcagagctgggactcggggcaggcggggctggggactccagggctagggagtccatctgctcctgtgggtggcaacttggccaagctctcggagtggggcctggcacccgggaacctctgtcctgacatccctccatcacccccagcctcaaacccaggcccaggcactgctgaggagtcccagctaggaggcctgggcacataccccctacacacacgtgtgcctggacacacacatgcacacacacgcacactgcatgcccaggtagggccacggggtctcaggtacagactggggagttaattgtcacccggcaccatgcccacacgtcccctgcccagcgcgggagttaactgtcacccggcaccatgcccacacgtcccctgcccagcgcgggagttaactgtcacccggcaccatgcccacacgtcccctgcccagcgcgggagttaactgtcacccggcaccatgcccacacgtcccctgcccagcgcgggagttaactgtcacccggcaccatgcccacacgtcccctgcccagcgcgggagttaactgtcacccggcaccgtgcccacacgtcccctgcccagcgcgggagttaactgtcacccggcaccgtgcccacacgtcccctgcccagcgcgggagttaactgtcacccggcaccgtgcccacacgtcccctgcccagcgcgggagttaactgtcacccggcaccgtgcccacacgtcccctgcccagcgcgggagttaactgtcacccggcaccatgcccacacgtcccctgcccagcgcgggagttaactgtcacccggcaccgtgcccacacgtcccctgcccagcgcgggagttaactgtcacccggcaccgtgcccacacgtcccctgcccagcgcgggagttaactgtcacccggcaccgtgcccacacgtcccctgcccagcgcgggagttaactgtcacccggcaccgtgcccacacgtcccctgcccagcgcgggagttaactgtcacccggcaccgtgcccacacgtcccctgcccagcgcgggagttaactgtcacccggcaccgtgcccacacgtcccctgcccagcgcgggagttaactgtcacccggcaccgtgcccacacgtcccctgcccagcgcggttagtgaggccacacgtgcagcagtcatcctgaagccactgggacccagacccgctgggctggcgccctgcacgctctgctcacgccacaggctggtacgctcacctgctcccccgccaggccagcgaagaccctacaaacgccaggatggtctgagggggagctgtgcctggccttggctcccgcacccccccgcagctacaccctggttggggccccggctcctcctctgccatccatgggaaataccaccaccgctgcaaaccaaagcccagctggtggcctagtgccagccagtgccagccagcaccgtccctggggccaggccaggtggaacttggctccacaccttcgtggctgcactggggaaggctgccccccaacctaggagcctatttcctcagctggaaacaggggaagcccacctccctcctccaaggccgctgtgaagactgaacaggtaccaaagtgaaggctcgggcctgcccccactgtcagggtgctgctgtgaccagggcacaatctcagcactgctatacgacacctgtctatcccgcatccggggccatgtctggggacatctgtggttgtcacaactggggggtgctcctggcccggagtgggtggaggcccgggacgctgctcagcaccctgcagtgcccaggacagccccaccccagagaatgacccagccctcacatccagtgtcccaggagagctctgtgagtatctccccagccaaaccctgagccctgtgagggcagggcctgcctggtccctctgcccctggtgtccagcagacatgactgcaggccactgagatgtggcctcctctctccaccaccgttcctatcttctgtggcagccactttttttttctttttggacagagtttagctcttgttgcccaggctggagtgcaatagctcaatctcagctcactgcaacctccacctcctgggttcaagcgattctcctgcctcagcctcccaagtagctgggattacaggcgtgcaccaccacgcccagctaatattttgtattaagcagagatggggtttcaccatgttggccaggctggtctggaactcctgacctcagatgatccacctgcctcagcctcccaaagtgctgggattacaggtgtgagccaccgcgcccagcgtttttttttttttttttaagacagggtctcactctgttgcccaagctggagtgcagtggtgtgatcttggctcactgcaacctccgcctgccacgctcacgcctgccacgccttcagcctcccaagtagttgggactacaggtgcacgtgccaccacgtccagctacattttatattttttgtagagatggggtcttgccatgttgcccaggctggtactgaactccggggctgaggcaatcctcccaccttggtctcccaaggtgctgggagtacaggcatgagacactgcgcccagccagcagctgctttgatctgtgtggaatcggattttgcagtccctctgcttcgtgggctgtgtcctgctgtgagccctgcctcgcccgatccctctggcctcccatgcgccttccacacctttgtggcccctctctgcacgggtggcgtgtagacccctctgagtgccaccgggaaacgctatctctctctcattcctgtggatggccagtggcctcggcccagtcacgggtgaatgggaaacgcccccaccattgcaagccaaggcccggaaccctgcactcagcctgcggcccgcactacggcctggcttcgctctgaggcgctggcacaaggctcccagactctgtctgtcacccacgcatgccctcgccagccctccctgcctgttttcacacttgggacggggatggggaactggagcctgtggggaagggaagcgggacgggtccggcggccccccgcccacctacgtgtcatccgattcgatggcctccccgcgcgcggcgccaccctggatggactccatggccgtggagtagagcgccttctggcccacaggccgcttctcatctgaggtgctctgggcgccctgcgcctgccgctcgcgctcgtgctggtcgatgttgtgcacgcccagcagcaggctgtagtccatgatcttgaaactttccaggacctggcgggatcgggcaggaacacgccacgccgtcagccgtctctatcccccacaacggctcccggaccctatggggttcccagcacggatggccccgtgggctcgggtgtgagagatggagtcccacggccaggcaggagtgggggttctagtgttatcctgaggaacagaggggctgcggtcacacagcggcatcagagcaggccagagaatgggggcttccagcctcacagcaggctgccccgggcactgagacagggacttcccttcctggctttactccttcctgagagacagggagccgggcctatgctctgaccagcccaggcccatgggcaaggacgtgcccggcctgacaggtgacacccaggtgggtggatgcccagggtagcctcaaggcccctgagtggtctgggcggttttctgggggtatgggtcaagttctcaaaggggtcggggagctggggatggtcagcagcggggcctgggtggagttggggagctgggaggtcccaggctctgctcctgacaggctggggcctcccctccttggctccatgcctcgaagctgccggggtgggacggggacgacggagctaacccaggcagaggaagagccgtgcatatcattctttcgctaacacggagccaacgcaggctccacggggacaggagccagaccctcactggacgcacatgggccctcactgtggcctgcagagcaagcagtcatcccatttgatgggtgaggaaactgaggcacagcaagctctcatggctggctgggagctctgggcttgtgaccacagcatctgaaggctgggctcttctctggggggtggggggactctaccactgtcatcgtgtaacctccagaggaaccacttctcagcagtgcagacactcccgacccccaagggctgggtctggggacatgttataagtgttttgttttctttgtgagatggggtctcacaatgttgcccctgctggtcttgaaaccctgggctcaagccatctgcctgcctcccaaagagctgggatcccaggcgtgagccactgtgtccggccacattttaggttaaggccataaaagcttgagcgcttctggatcccacactggggtggggcctgctgtaggctgcagggcaggtgggcctcggcctggcaccctccctggccctgcctgcccaggccgagccctcaccacgcagtcccacctgccaccctccctccccggccggggccgagccctcaccaggcagtcccgctgcagcgtcttgaccagggcgctgaaggtgtcggcgtccagcaggagcccctcgggcatgtcctgcatgaagtccaggtccttgtaggtggggaagctcttctccttctccttcttgctggcgcgccgcttgtaggtggagcccttgaggtcgaacttgaggtgcatcttgaccacgcggggcaggatgttgttcatgaccacgacgcggatgttcttgccccccgactgcacgcagtacagcccatagaacttgggcagcagcgtccgcgggttctggttgaggttctgccgggggaagagggcaagtcgtggagggcggctgggccacagactcacgggggcgggcaaagcaggcctctgcctcagggggctcatggatgcccctggccagcccccctctctccccagaagccctcggggaccccgttcctatgcaggcacccagctggccttcccacggcaccctgactctcatgggccacaactgtgagctccaggagggtctgtttctacagagccaggccccaaggcaggcgcttctgttccagcagaagcttccacactccctgcctgcccacagacatcgccctggctgggctcgcctgttgggaggtctggaggccggaaacgcaatgctgtatcctaaaatacatacatgtatgtatatgcacacacaaacacatacacacacacgcacacacacatgtattttcttgagacagggtctcgctctgtcgcccaggctggagtgcaacggtgcgatcacagctcactgcagcctccacctccagggctcaaaccatcctcccacctcagcctccgaaagtgccaggactccaggcgtgagcccagcctctatgttggttatgctttgcctgtgttgaactgatcaactcagactttcactccaaatctgggtccccaggcgcagtgacgagtctgggtcctgctgtaccctgtagaccccaagcaggcactgggtgactcaggggcacccaagtgaagcaacagcgccccctgcccagagcctctcaatgacgaacccagtgggaagctgcccaggtgtcggggctgagacagacccacagggagaggagtgaggggcgcggactcaggcaccagcctgggcaggctaggtgaactccagcccctgggccgaatccggccaccacctatttttgtagggctgtgagctaagaatggtttttccatttttaaaaagtggaaagggcccagtgcgatggctcatgcctgtaatcctagcactgtgggaggccgaggcgggcggatcacctgaggtcaggagtttgagaccagcctggccaacatggtgaaaccccgtctctattaaaaataaaaattagctgggagtggtggcgcatgcctgtaatcccagctgcttgggaggctgaggcaggagaatcacttgaacctaggagatggaggttgcagtgagccgagattgtgccattgcattccagcctgggcaacagagccagactccatctcaaaagaaaaaaaaaaaaaaaggccaagcacagtggctcacatctataatcctagcactttgggaggccaaggcaggcagatcatgaagtcaggagaccagcttgaccaacacggtgaaaccccatctctactaaaaatacaaaaattagccaggcgtggtggtaggtgcctggaatcacaactactcaggaggctgaggcagcagaatcgcttgaacccaggaggcggagcttgcagtaagccaagatcacgccaatgcactccagcctgggtgacagagcgagactccatctcaaaaaaaaaaaaaaaaaaaaaaatgaagaggccaggcgcggtggctcacgcctataattccaacactccaggaggccgagacaggcagatcacgacatcaggaaatcgagaccatcctggctaacacggtgaaaccatgtctctactaaaaatataaaaaaatagccaggcgtggtggcgggcgcctgtagtcccagctactcgggaggctgaggcaggagaatggcttgaacccaggagggggaggctgcagtgagccaagatggcaccactgcactccagcctgggtgacagagcgagactccgtctcaaaacataaataaataaataaaaaagtggagaaatagaaaatagtctttgatgacacgtgaaagtgatatggaattcgcatttcttggtccataaataatgcgtatgggcacatggccgcgcccatccattctcatgtggtcacagcagctcgctgccatccaggcagagctcagtcctggagacacagcacactggctcgcagagccaaaaacactctctctgggcctttaaagactgagtttgctgagcctgatctaaggagcccgggcccctcgctaagcatcacagagagtggatggaggaggcctcaagggaaactgagtcacaggctgtgctgtgctgcccagggccgggcagcagcttgggcctggcaacatggaaggcgcccacctcgtctgggcgagtaccggaatcccaggcccaggaacactgtggcagccgccggctcctactcctactcccccctcccggggcctgacgcaccctttctgtgagtcatgcgggatgaggggtgggccggatggagctgcctcacgcctgcctgagcagctggtcttttgtggggtaccatctggtggcccatccccctcctctctggaaccctctgagtcacccttgggccccttgggcctccgtggcagctgacagacgctgcccgcaggctgctggttctggggcccacggctcatagggggtgttggcaaggtggggatggggagccaggcaggggccggtgcccacccagccctgcccggggacggcccccaaggcgtgtggccacaggaggaagagagggcggctcctgaacactggtgctggtgaagcctgacgggggacccccgagggtgagtccccgggacccaagatgcctctcaccacgccccaaggatgcctgcttgcccaagccttgcagacatctgctcccgccagccgggagaagggggttgaccgaggagccatctgccccgcagggcgggccacgcaccatgtagtagccagggagcagcttctgcaggaactcggcctccttgtgcatgacggtcttgatgatgaactcgtcgtcgctggtgacgtagaagagggagccactggcgcccgggttggacagctcgatcagcggctcattgcacagggagtactggaagcagaggaggcgggtcagcgggccccaagctgccggacacacagacagcactggcttccggtctgcccaacagccccaggaactgatgacgggtcgctgcattttacagatgcggaaagagaggctcagagagggcgagagacttgcctgaggctagccagcaaggactggagcctgaggccgagctgactctgcagcccgagggctggtctgctagggcgcactccccaggctgcctgctgctctccttaggagcggacacctgatcgcaccggggtgctgacgcgcgtggctaaaaggtgctcccagcacccctgaagctgggtggggccacaacgccagctctgccccatgagtcataagcagaagctgtcaggtggaactcagggaaggctccacagatgggcgacaggcagctggcatacctgcgtatttgcccttctctccttcccacctatttccctcctgagatgctgatgtgatggctggaacctcagcagccacactggactagaaggtaagctctgggatggaagctgcatctctgatgggcaggccccactctggcccctggcaccccacagtccaagcccttcctccccacttctctgcccctttttctcagcccctgctgtttgtttcatgatgtgctcgctgtctctctgcccccacgccctctcctggacattaggcagaaggtccgtgcaggtggaagtttttttgtgtcactgactcgacaggtgctcgatttgctaaggactagaatgaagatgagacccacgggtgctaccctgcgtcttccgggtatggaaccaatgaagtgtgcatggggctaaggccatctgtgtcacgccctttaaaatcctaactggtcgccattggtgtacacggatgaggtcagagccagctccccatcagcggagcaagccaggccccccagggtcaacgctgggtccgtatctgctggacgacagaagggtggtctccgagtgctgcgtgccgcctccaatgctgctgtgataaacaggtggggggtgtccacgagagtcaggagtggtggcgagcagaagcgaggggaggccaggcacggcggctcacccagcactctgtaatcccaacaccttgggaggctgaggaggatcatttgagcccaggagttcaagaccagcctgggcaacagagcgaggcctcatctgtactaaaaaaaaaaaagaaagaaaacaaaaacaggcatggtgatgcccatctgtggtcccagctacttgggaggctgaggtgggaggatcacttgagcccaggaggtcaaggctgctgtgagctgtgacagcgccactgccctccaacctgggcaacagagcaagagtgtttaaaaaaacaccccaacaagtgaggggaaccacctttggaaaatgctggaagagccaggggcttgaggcgtgagttgggtccccagcgccacacacactctgatctgtgaatatgtttggggaccagaggacgccggaaacatgaggtcacatcaggcccagggcctgggaatgccccagtccctccttgggctcaagtcaccacccccgccctgcactgcccgaggtgctctcgggccagggaacggcgccatcagttatcacacgtcggtcaacacaggctggattttgcggagtcagcaacagccctgccaaccttggcagctcagaacagcgagggtccttcctcctgcatgcgctgcttctgccatggcctggctgggagtgatggtgcagggtgagagagccgtgtggggtggactctgaggctggagggagatctgtccaggccactgctgtcgcccagcccagccatctgcctgcctttttctgcccacagccacgagccacaaatatccacaggaaacacagagcccacgcggctcctccgccttccccgccacggcaggacgccctccagcctcccagacacaggcgcagcagcgcagagcgaaggcgggtctctcctggggctggcgccctccctgggaggccaggggaccccgccaagccctgggccgctgtcctcaggtcacccggagcaggggacaccccaagcagccggagtgtccctccgagacacaaatcactgctgcctgtccacggtggcaggagggggaggccgatctcacctgcagagcggaaaacactgtggaaagggcacgttcggctttgtacaaagaacaccgatgacagggaaattctgaagccacatgactaatggcagttgcagggctatggcctccatgggcctcagctgctacggggaagcaggccccatgcgtggatttctgagccaggcagtgccaggacaaccccccacagcctccttcgtcggtgctggggctctcggcagctgcgccgctgaccttggcctcctctccaccctctgctgaccactgggcagggctgagccccaccctgcatcccacctccgccttctccttcctggctgtcctgagctgtgggccttcctggagctaccccccttaccaggggggactgtgacctcagctgtccaatcagagaagcaccggcaacctcgagtcccctccgaaccctacctgtccccactcaagctcaggggccctgtggacagcaacacgcacactagcccgtcctcccgctgtggcacacggccacactcacaccacagcctggacagaggctagggggctgccgcctgctcagcaccggaggcccccaagagaattctcacactcctgagatgagcagaaggattcgggggtcaccaacaccgggctggctccccagatgctgtgggtgcacacctggcctaaggccctggaatgcgatcttatcgggttctaggtgagacccagatggccccagatcggcttttatccgtccactcctgctaatggacacgggtgctgtctctctgctacgagccaggctgctgccttctgttcctggccgcctcacacggtagcgtccaggtcacccgagggccatttctaggcaaaaaccccagctgtgttttcactccccactgccctgccaagctcaggcaaacgctgggacactgaagtccggaggctgggccttggcgacacgacccggagcatggtgactcccgggcacctgaacaggctggagttctcggggcgggggaggggggggtgtcacacgtacccctggctggagcacatgctagttctccctggaagagcgcagcctcgggcgcttcctacagactgagataaaccaaacgcacgcacagtcagcaaccaccaaagaaaggcacaaggaaccgaccaccgcgggtgagggcaggatcggagaaccacaggctcccggccccggggaccgtgctgtcgtgacaaccagaacgccaaccgcacttgtctacagagttccagtcttccctgatacaaagttctcgggatgaccaggcaggcttgggaaaaggccacccggagcttttagaagtggtgatggcgcaggttggatgccggggctcacgcctggaatcccagcacttcgggaggctgaggcggtagctcacgcctctaatcccagcactacgggaggctgagacaggcagatcacgaggtcaggagatcgagaccatcctggctgacacggtgaaaccccgtctctactaaaaatacaaaaaattagccgggcgtggtggcaggcacctgtagtcccagctactcgggaagctgaggcaggagaatggcgtgaacccaggaggcggagcttacagtgagccgagatcgcaccactgcactccagcctgggcgacagagcgagactctgtctcgaaaaaaaaaaaagggggtgctggcgctgatgagctccagggccactgtggggagcaccaccctccaaacacctcttttaggagcccggataatgggctgctaggtcaaaggggttggcctagattttgactttgctaacctgaaacaataaagccatggctagagctaggaggtccgactctacgctggtccccagtggcacccacgtcccagtgccttgttctaacccttaagtctgaaaatgggtcagtcactttggcaccaggctgcagaagactataccaactgtttggtgagtggacaccctcgcctgctctgatgacaaggcccacatggtgaggaatggaggctcccagccaacgccagccaggacggagtcctgcagctgccagtgatgtgagcttggaggccgatctctcctgctttcccggtgagtctcacaggagactccggccctgaacctgaccataaccctacacgaggaacccagggaggctgcccccaaatgcctgacccacagaccctccgagaccctgaacatgttctgtttcaagcctggaagcccgtaacagcaaatatgcttaccaagtaatcatctggccggatcccaaagagctcccggaagtagcggaaggcgacaggtgcataggtcttgaagcggaagtcctggaagtggtgggcgggggtgaggttgctgccttcgctgtggaggaaggacgggaggaaacctgtgaggggtggtgggcacctctcccccacccccgccatggtccctcctagtgcctctagcagctgagcctctagcggctcagctccaagacttccttgaaacggcccaatcccacaagcaacagggggctcccgatgggactgtcccccagtaaccaccctctcttctttcattaacaacggggcccacagtgttggccaggcacatggccgccaagaacaggaccatgccgccccagcctcttgcagctaggtgtgctcacgtgactgcactcagccaatgacacgagtggagcagaaacactggtcatgtccgaaagggaagggctgttgttctccttctgttgcctcctgtggctggaatgcagccgtgatggcaggagctttggcagccacctgggaccactggtcacagagctgtatattgaggatggcggtgtggggtgaccagaaggatcccaggaccccaacaccatggaacctcctgaccagccctgcactgcccactggttatttgtagattagaaaagagctaacttctatcttttctttttcctgttcttaaactgcctttacattgggtctctgattcagcagcaaacaaacgtcctgacggacagagggccagagctcaaggccaaggaggcgccaggaggggccaggtgctgctttcagcagagaagggcgctcaggacaggccactccgcctcagagccacgtgtgtgctgggtgagccctgaggctccgggggcccggcccacctggggaagaagatgctctccaccacgtagaagtcctgcatgagcacgtcgcgttcgggcttggagctcaggtggcccacggtgtagccgatgcccagctggatggcacccttcagggtggaggaggtggtctgcagggagaccagagtgtcagggcccccggctgctccccacgctgccctgcaccccctgtgtgcaccggggggtggagatcgtgaccagctgcagcttgggacccggcacctgccaaccccctcctggtggtccccggggctgcctgtcctgcggctgctgagctgtcgacatcaggccgggggatgaagccaccctccctcgggccacacagccaggacagggctcggctgcaactgccgcaccacgtcactcagccctcccagtcctgttggctagctaggttctaaaggttctcccattttgaaacagctccaacttagcaaaagggtcgattcactgtcaagagtttgtttttagggggtaccatttacagcgagatgcccagatcactttcacatctgcagacgcaggttcccgttagctgctttctatgtaacgcacgtggtcacactgggcaacccacatggccgctatgtgcctcagtttccctgcctgtagacagggatgggcacaatggttctggccctcttgcggacgtggtgtcagctgctgttattatttttatttgtttattttttgagacagagtcttgctctgtcgcccaggctggagtgcagtggcgcaatctcagctcactgcaacctccacctcccaggttcaagtgattctcctgcctcagcttcctgagtagctgggattataggtgcgcgccgtcacgcctggctaatttttgtatttttagtagagacggggtttcaccatgttggccaggctggtctcgaactcctgacctcagctaatccacctgcctgggcctcccaaaatgctgcgattgcacgtgtgagccagcacgccggccccgttattattttttgagacagagtcttgctctactgcccaggctggaatgcagtggtgcgatcttggatcactgcaacctccgcctcctgggttcaagctattctcccgcctcagcctcccaagagctgggattacaggcacgcaccagcacacccggctaattatttttttgtatttttagtacagacaaggttgcgccatgttgcccaggctggtctccaactcctgacctctggtgatcctcccgcctcggcctcccaaagtgctaggattccaggagtgagcctccgcgcccggccggctgctgttatttttgccattggcatcgtttgcattattctcactgtgtgctctcgcgccatgttcactttagccctgggaagccggctcatacctccgctctctaattccggtctccagtgctcctgtcgcaggtgcgaggtggcagggagggaggtcgggagttgggagttggtttctgccactgcccagtttcggcctgtctccctcctaagccacactctgggtggtggggggtctggcctgtatgttcacctccccgagatgccacggacagaacagacatgtgcccaaagataacatacaaacggccctgaagcccgcaaagacgctccatgccactgggcaccaagggaaagcacatcaaaccacaggggggccacgcacctggaatcccggccagtcgggaggccggggtgggaggatcccctgagcctgggagttcaagaccagcctgggcaacatggtgaaacccctgtctctaccaaaacaaacaaaaagacacctcgaagagacaccacctcacacccatgaggacgccagaatcagagacaacaatcacgagtgctggtgaggacacggggacgctgggcctcattcactgttgctgggtgtgaaaacggtaccgctgctatggagaacagtttgcgagtttctcaaaagatgacaccgagttacacgtgacttggcaattccactcctgggtgtctgcccgagacaaacgaacacatgtatccacacagactcacacacacgtgtcctcagcagcacaattcacaatggccaggagtgtgaagcacccgagcgtccatgacgcagcaaaggacaagtgcagcacgggcgccccacgcaccagaacacgactcagccatgaacaggagcaaggctctgacacgggccccagtgcgaatgaaccctgaggacgctacactcagtgagagacgccagacacagaaagccacacagtgtgtgattccacttctatgacacgtccaggacaggctgatccacagacgcaggaaagggatgtgggtgccagggctgggagtcgggatgggggtgactgctaacagggacagagttgctatttgagctgatgcaatgttctggaattagaggtgacggctgcacaactctgcatatgtactaaaagtcatttactgcacactttaaaggctgaattgtacagtatatgaatcacatctcagtaaaacggttacttttgaaaaaacaggccctaggtgggggtgggaacagagtgggggtcaggcttcctaccaacacggtgtgagccaggccagcctcagagtgtcccatccactgcccgaggtggtggtggggtccataacccctctccctcaccagggccgagagcccaggctctgcccgaggtttcagggactcagagccgggcaggcgttgcagccaggctgagccacagaacatgctgcccggccgcccggcaaggacagcaaacagtggggcctcatgcaggactgaggactccagcctctgcctccacacagcccacacctgtccctgggcagaccctggtttgtgtcgggggcgataggccccatccatgctaccagtgggatccccctcccctctgctctgtcccgctccctccagccagctaaggggagccgaggaaccttcttgtaggtggtttcgccggatgcgtccacacctcgatggcccaacttcttcccatggccagggcccggctgtgccgtcatggacagaacctgggaagaggaagcaggaagcgttaactccctaaggagcacgcccaccgggacagggcacgctctgaaaccctgggaagaaaggtttagtcgttgggcccagcaggggtgcacagggcagggggcaggtccaggcgactccggggtgcagcaggaggcccctcacccgtgggcgcctggcgggctggctggggcccctcagtgtcccacactggacacccagaagcgctcactccaaggtggagacctctgcctcctcaggaagggcaagaggattgggcagctccagccctctaattccagggtctcccccaggtgctgtggacactggggctggaccgttctttggggtggggccaccctgggcacagcagggtgctgagcagcattcctggcctccacccactccatgccaggagcacctcccagttgtggcaaccacagatgtccccacacaactctgcaaatgtactaaaagtcactcactgcacacttcagagagtacagtatgcaaatcacatctcagtaaagtgggtattttttaaaaaaacaggactgaggtgggggtgggaacagagcgggggtcaggcttcctgccaacacggtgtgagccaggccagcctcagagcatctcacccaccgcctgaggtggtggtgggagtcgtaactcctctccctcaccagggcccctaactgtgagaccgctgggatggaaggattgaaaagaccaccttgtccctgagggagatggtctcactggccagggtcaggcccggctcctgcaagctgtcgggcagcgcgggtgtcccagcagatgggaccgccgaccccagggggcctcagcttgttgccctcgagggaggatgtgaggaggggccttgggagcctgaagggacacagaggccaaccaaggagaacagccccgcctggcaccgtcatttaaggagcgccactgcgtttgctaggagaccccatggaccctccactggccagaccccatcccaccgctatcagccccagggacacgcctgcagccctgacccctgcccctgccctccctccacagccgacgctgctcagccatgttccctgcattctcccaggtggccgccagggggcaggctctccccaggaattcaccccgccacccgggccaccctccacccgcgccaccctccacactgcccccacgccgggggactctgaggaaggatcccagggtcccaggcctggtggacaaagccctccaagctctggctacggacgcagggccaagggtggcccaggtgggacaggtgccttggggactgctcctgtgaatggggctcatggacaggtgccctgaggactgcatgcgggaagacgggagatgcagcagctcgggtgccctcagaggacggcccaccccactgcgcccactggggctgggaagaaggccactcggcgccacggggctggcagaagctgcaaaggcagggccaacgtgcagagaaagctctcgggaggagacgggcagcaatgacaggacccatgtacatgcagatgtgcacacacacagacaaatatgcacacaggcaaacacacgtgcagacgtgcacacaggcaaacgtgtacatacgcacgcaggcaaacaggcacacaggcaaacacacatgcactcaggcaaacatgaacacaggcaaacacgtgcacacacgcacgtaggcaaatgaacacaggcaaacacgtgcacacatgcacgcaaacatgcacacacacaaacgtgcacacacacaggcaaacatccacacaagcaaaaatagatgcacacacgcacgcaggcaaacatgcacacacacaaacgtgcacacacgcacgcaggcaaacatgcacacacacaaacgtgcacacacgcacgcaggcaaacatgcacacataggctgcacacagcctcactgtgcactacgcctgtgtggctcacagacactgagggcgtgggtgcagctggtagcctcgggcatcgccctctgggcagcgtctaaccctccagccaggtcttccattcctgcccccagtcccccggcgagagctgctctctccccaccgcccaccccccagaatccaggctccacgtggcctggaacccagagaagcccttcctgcccctgcagccctgaccaggcacccctgccactgagggtgtggcccctcagatgcagggccccctcctccatcacggaatttcaccccgacctctcaagacgcagttggtgtagacctcacgttcatcctgcttgtggacactggacggcatttggggcccagagaggtgtagtgagctgccccaggccacacagcttctccgcgagtagggaggcagcaggtcagggtggggaccccaggcccttcgtccgctccagacactcacctctgttggggccgccttcttctgagccaaacctgcagaagagacaagctgggtatcagacaggaaaccggtgacctctgggagtcctgggcccagcccccggcccaccttctggcgccccaggcctggcgtgtgtaactccgcgtggggctggtctcaaggctacacacaagtgaagacatggactgagtgcgctgggaggatgtgatgagggtgggggccactggggcctgccatggtcaccctggttggcagccactggggcctagagcaggggagaggctttgcagcctcagggagatgggcagctggtgacgcctaggcttggcacccaccacggagggcctggggcttggacctgcctggaggaggggaggggaaatagggagcaaacctcccccggctctgacccccttcacacccagacatgaggttctgggcagtcaacaactgagcaggtctgaactgaccaagccccgcttcctcggaggcaggcgccaggagaggctcgggcatggggaaatcaggtgccagcgtggggagtgagggggggcaggcccccgctggggcgagggcaggctggagttgcagggagcgcccagcacctgggcagctgcggtcagtgggaactggccaggggtccccagggctgccgccctccctgcccctctccagagtgaggtttgtggaagggtaagagaggctgcgaggggacccccagccctgccctggctcctgggcccgcagcctccggtcagcgcagcagggcctgggccgcagctccagagaggacaacagaggcctgcaggattgagccaacgagcccaggcctgggctgagccgggagcaccttcctccatgcaaggaggctgggacgaggggagcaggcgagactcagctcctaggacccaggaccacatccccagccctggctcccagcagcagggccctggggtcctcatctggagaacgggaacagactctacagctgtgattacaggccctgagaccgacgggagatgatcctgggggacctgggagcccgatgtcctcacagggtcctcacgagcgggggcgagagggtgagtcagacagagactggaagaggctgcgctgtggctgtgaagagggaggaagggacctgagccgacagatgcgggcgcctctagatgctgggaaaagggggaaacggattctcctctgcagcttgtgctgggcccagccctgcccacagcttgactttagcctggtgaggccccgttctggggctggactcctggcctcggagccctgaggtgggaagcgatgtcagcgactgcagggatcgcacgtgctggcgtccaccatgcaggcctggggaagacctggtctcgccctcaaggggctcacggtcaacaggggtgggcgcagggctgggtgtttgatgtggggtgacaggcggggtgcggatcagcaagggggggcttccctgggctggtcctgtctgagctcagtgccgaacaaggatgccgtgggagccggagggagttccaggcggagggaacggcagcacaaaggtcacaaggtggctgaggcagccacgctgcacggataacagcagcgtcctccaggctcatgcagaggcgggtaccgaaggggagtgcctccctgttggattccgatgctggcaccacccagggcccaggggcatggagacaaatgcttcttttcaatcacaggggctgtgggtcagggctgactccaccccagctctgccagcatcttctcactccattcccccttcctagaggaagaggctgagggttggggaagggagggctggctgaggtctggcagctgggggtgctggggcaggccctcaaaggggattattatgagcccgtggagacactcaggctgcgccggagtgtgtgcaggagggtgcggcaggtgccctgctccgtagggctcggccctctggctgcctccctgctctgggctgggcagcagtgcgttggaactggtctggccctggcttccaggccggctgaggtgagcaggggaggccaggacatgtgaggggccaactgggcgaggttcagggaggtgcagacaggtgaggaggtgggtgcggagtccgcggtgcagacgggggccgtcaggggtggggacccggctgggtgtggactcgggagaggggacagaggagaatttccccgagagacaaaaagtctttctggaccaaggccttacaaagccagcaaagagtgcagagaaggcgggagcccttctgttttatgacgcggaaagagatgctcagagggaggggtgaacccacccgaggtcacacagaaggagaaggaaagtcaaacctgggcctgggtcggcgatgccccaccctatcagccctgccagcgcccctcggcccccatgggcactgtgctgctctcggtgggtgcacgggagacccacgtgtgtcccatccagaggctgcaccccggtgaccgccctgccgtctgaaaacacgtccaccgcgggcactgaaggcaactgaatgcgacttggtggagcagcccatagctttgctctgctgccgggtcagaactgccggagacaagacgaaggcacgaggtggaaaactttgctggggtcaggagcctcggggcaggggcaggccggggaggggcctggggtcaggagcctcggggcaggcagcaggtatggagggggctggggccagaagcctctgcaggcggcaggtggggaggggactgcggtcaggaacctggggcaggcggcaggtggggagggggctggggtcaggagcctctgcaggcggcaggtggggagggggccgcattcgagacgctggtgggcccctgcagtcgtggtcagtccccacgcctgcctgagggtgcggggttggacggtgtccctccgacattcacgtccttccaagaacctcagcctgcaaccgtatttggaaagagagtctttgctgatgtcattgggtaagatgaggtcatgccggagtggggtgggccctggatccaccgctgtccttataagagaagccgctcagggaggccaagatgccgtgtggggtggaggcggggagggcaccactcctccaggccctgaaacgccaaggatgcccggaggcaccaggagcagaggggtgtggagcttctccgaggtcggtcgggagggcagagccctgcccactcctggacctcaggctcctggcctccagagctgagccagaacaaacgcctgttcaaggcctgctgctccaagccccccagtcccggggactttgtctgggcagcccaggacctcacacggagccctccagtgaggaccccagccctgggtgggagggggcgtacttctcaaggcagcaagaacagctgaagggtcctcccctcgggccacctggatgccctgcagggctgggtgggcagcgggtgggccctggagggatctgggggacagacccatggtgctcactgcaggggcggggacggggacggagggagtggggtgactcaggattccggctgccacggtgaagggaaagacgggctgcttctctgtccttccagaggacagggccagtcgcccccaggtctctgacaggccacaaagggcctgctctgggccgcggcggggcggaaggtgctggacgctgacgtgatgtttgggttggcggcccgggagcagaacaattcacggttttacgtccagggtgtgggggaaggaaaagaagagagggcaggaagccagcggtgggccggggcgggacgttccagacctcatcgggggcccgggcgtccccctgctcggcctgtctggggcctccctgcccacagtcctgactctactcgcgaaaccacccctctggggcccccccacacccacttgggtgactcagctgttttcctcagtggccccgatgctgagaggtcacagcgcttgggtccacccctgcccggactctcccaggctccctacggccccgggacccagtggatgcagtgaggccctccagacccagctctgctgacctcaccaggcacctcggggtcacccgtgttgggtgtaggccccctgcctcagtttccctctgtggttccacgtcttcacctgcccgactcacctgagctggctaacggggagaggagaggagaggggcaggcggctcgggccctgctgggaacgtccctgcactgggggcctgtagggttaagggactggccggggccgaagcactgaggtggaggtggagcaggacggagaggggaggcactcggttgggggaccccagggaaaatgtggggctcccagggcaggcaggaacgggcagcaaggggagaccagagccgagtgtcctgtggaggagaggggacggggagaaagcacagccttgctgccaccgcctgcccagggggtgggggcaggtgagcgccatcttcactcaatcctcgctccccatgaggcccgctcagggcacagagcctgccgtgacccccatagggggctgtcatgacggtgagctctgctcagcctgagacgtgactaattatctgctgaatgagccaccccgttttcgaggaaattaggttttaaaaatagtcgggggaggaaaggcgagccgcgctgcggagccgggaggtggcccctctgagcagtttccgctggccaggcccgaggcgggggctctgccgctggggcccctctctcctggccccatcacaggacgtggtggcgacccgggcctgcggtgcacggctctgatcgctggctgcacggtgacctcatcggccaccccacctccctgtgtgcccagggcttctctctgagcctcagtctctctctataaagtgcggctgaagccagctcgagccctagaggcactgccattctccacggggccacatggccgcctctgcacccagctgttccctggcctgcgcctggtctccgccctggccctgccagtgctccctggacactgtgtcccacaccagccacctttgccaccccactgacaccgccccatcctgcagaccagcctggtccctcctgctgagcctgggggctccctcaggacggggcctgccctgggctgacagcatgggcgtgtttgttgactgacccatggactgacagatacccgttcctcttttctctgcacaacaggcctccgccagagcttcctctccacatctgtctgacatggacactgaggcagggaatgactaaactgggggaggaggcagattgtcaggctggctctgcagtgagacccaaagtaagaatggggacggagaggtctggacaggtggccagagggagggaggcatcacagtgagaggaaacagggcacattctgggctcaccgacagggcgccgtggggcagagggcccagcgaggcaagctcgagggtgggtggaaggtgcctcagcccctgtgggcacctgcagggcactgtgacagcaggcaggacaggaacagtggtggcctcatccctgtagaaccaaggtccagacccccatggctgggaggagaaagccccagccctggaggcggtgggggcggggggagagtgggcagggccctggaaggcccaggatgatgaagctggggactggggggctggggactggggggccggggagagcccacggcaggggagggattctgcgaaagggggcccacccaccccgcccccaccgcagacaagggtctccccaggcctcactgcaaccctgcagggtgaagaccaggccctgtcaccccaccagaccctgtgtggccccctccctgccctctgctcctccctctgctccagccacacgggccctcgctgtccctccagcacgccagcgccaccctgtgtcatggcctttgcacgagcggtgcctctgcctggcctgccagtcccaagattccctcacggtttgttcctgtttcaccccagacctggcttgaacatcacccctcagaggcctcctccagccaacctgcaccaaacgatcccctcctcactgcccggcacacggcaccacctgatacatggctgttgtcatccccacaacaggggtcccaggcctgctctgtcacctgctcacagactctggcaaagctctgagggcagcaagggaaggccagtgagaaaggggcggcagtgggacccaggtgtgtcagagtagcacagggggcctgcacccctgggtggggccgctgcccagagggcaactgctgggcaccccaggacaggtgcaggctcgccgtgacacagcaacccgggtgtgtgaggacggcccaggcacggggtcctgcgatcccacaagcaggaagcaaccccgggccagagctcacggtcacctccctcattcgctggaacaacccatcctctggcctcccgccgtgcaggcctccgaccatggggaccacaggcccctctgaggacctgccaggacggccaggctgggcagcggcactccacgacacaggctggggtggggacccggaggcggcagggccgaccctcagctctggtgaggctcagaccaggacccggcggacaagggtaggccgtgcaagaatcttctcctgctaaactgcagaaaggccttctgtggctgtccacagatggctgcgacgcttggcagtagtgtgacttgctctgaccaacagaatgtgatgcaagggatggtgtgggcgtgaggaaggctggcacttctcactgtgcctctgggaacctgggccacgacactcagaggccagctccctgcaaaaagaccgggcggccccagctgttcctgccatcctggctgagggttggacaggcaagtgtaggacgagcttgaatttcctgccactgccgaccacagccatggaactaaccccaggtatgacctacagaagaaccacccaactgaacccaacccaaataacagaatcgcaagcaaatacacagttgtttgaagcttctgtctgggggtggtttgttatacaatagctgactgaaacagatctcggctcactacaacctctgcctcttgggtttaagtgattctcctgtctcagcctcccccgagtagctgcagatcttggctcactacagcctccgccactcgggttcaagcgattctcctgcctcagcctcccccgagtagctgcagatctcggctcactacagcctccgcctcccgggttcaagcgattctcctgcctcagcctcccccgagtagctgcagatctcggctcactacagcctccgcctcccgggttcaagcgattctcctgcctcagcctcccccgagtagctgggactacaggcacgcaccaccatgcccagcttttttgtatttttagtagagatggggtttcaccgtgttacccaggatggtctcaatctcttgacctcgtgatctgcccgccttggcctcccagcgtgctgcgatgacagacatgagccaccgtgcccggcctatctgtggacttctttggaacaggaggagttacagtttttaattcctttgtcttacttggacttcttacattcaaagaagcattaataatctgtacatggattattcagccatgaaaaggagtgaggctctgacgcaggccacagcacggatgcaccttgaagacgtcacactcagtgagagataccagacacaagaggccatgcagtgtgtgaccccatttctatgaaatgtccaggacaggctgatccagagagacagggaggggatgcatgggtgctggggctggggagggatggagagtgacagccgccaggcgcagggtttgctttcggggtgatggaaatgtactagaattagtggcagtgactgaacaactctgtgaatacgccgagaagaatttactcagttgcaataagtaagcagtaagacactttcaaagagtgaattttgtgtcccagaaaagcaaaatgaagatgcagatccctttagttgcaaaagcattgcccagtgacatacaccatctggaaccttctccaaactcggtcatcccccagggcctcagtttgcttgtctctaaaggaggttgggggacttggtcaaggcttgaccagaagggcagccagtctgctgcaggctggagcttctcacactgtctgtgctgtagaactgagttcaacctttcttttctctccatcatggaccaaggcttttgtgaaacgcagtaaacagcaactaccgaggtctgaaaggctggtgccgaccctcagcttctgctcctctctggtatggaccgggatggacagtctcgtccatggtgacatcaaacggccctgcctcaggcctcttctctcttgatatgagtgtacccacatgcaaacggcttgggggcctccaggcaccccccaaagcccatgcaaaccaggatctcccccctcagcacttagggctggattgttctctgggctggtcactggggccgtcctgggcactgcagggtgccgagcagcatccctggcctccacccactccatgccaggggcaccccccagctgtaacaaccacagatgtctccagacatggccccgtgtccccaggggggcaggatgaccccaggtgatgccccgcttcagtagcccctgaggttaaacccttgggtgagatgttcaacacggctgcaacagcaaatatctgcaccaggtgccgaccaagctctccccacacaggatcccacccagcctgaccaggcagccactcctcacggcttcatttgacacatggggaaaccgaggctgggagaggtggaaggattctgacaccgctggggagaacccatgtggccaggcctcccgcgtgaccgtctctaacccatacaggcctggcatggtaggcaatggggtccctgtttggggacaggcagcacccgactgatggtccccaccgggaagtgatgagagatgtgaactcaggtacctgcccggccctgcagccccaagcccagcgagtcgccgtaaactgtcacccggtacatccgcggtccccggcacccaccactcccagcacaccctggtgagtggcccgcccgggcttggttctgagccctgcggtgtttgggttcggtcaactctagaaatcacaatgttttggagaaaaacctgggtttctcgaaaaacaggcagatctagaaataaaaggctgcaccatcactcggccccccgcctggcacactcgcctctgccttcgccccccacggcccactccccgacggcgcgtggccaggaggcgcctgtgagcacctgatccagctgccacctaattcatgatcaccgtttgacaggccgggaaatggggatttggggaaatttaggaagttacccaaagtcaacggtgaaaaacgctgtgatcccatctccgaatccagaaaaaccttcaacgaaattcaacatgaatttcacgtccccccaaaatactaccaagaaagaaaaaaaggagagaaagggagactgcttttactttaaaaagaaatataagaccaggcgaggtggctctagcactttgggaggctgaggcaggaggacggcttgagcccagaagtttgagacttgcctgggcaacatcgtgagacccccatctctacaaaaaaatttaaatattagccaggagtggtggtgcacacctgtatttctagctacttgggaggctgaggcgggaggatcacttgaacccagaagtttgaggctgcagtgagctatgactgcaccactgcactctagcctgggcaacagagcaagatcctgtcttaaaattaaaataaaataaaataaaatataaaatgaaagaagtataaagcaaaaagttatgggaaatgccttaatgtcaaccacaagaccaggggtgtggctgtgagagccgccactgcagcggaagtgctggctggagcaataagactagaaaaagagaaaggaatgaagactgaaaagaaaaagagaaagttttaggccaggctttacggtggctcacgcctgtcatcccagcactttgggaggccgaggcaggcgggtcacttgagcccaggagttagagaccagcctggccaacatggtgaaaccccgtctctactgaaaatacaaaaattaggcgggtgtggtggccagtgcctgtaatcccagctacttgggaggcggaggcaggagaatcgcttaaacctgggaggcggaggttgcagtgagccaagatcatgccactgcactccagcctgggcaacagagtgagactccctctcaaaaaaaaagagacagtgagtccagttcaagatgctgaatcgtgttaagtgttgacaggtgggggtgctgaggtctgcaactttgaaaggcttccaaaaaacaagctgagagggatggcggaatggagggatggtgggatggagggatggaaggatggtgggatggagggagggatggaggatggaggatggagggatggagggagggatgcagggagggagggagggatagatggagggatggagggagggagggatggaggggtgggagagggatagagagagggagggagggaggggagggagggagggatggaggagggatggagggataaagggagggatggagaatggagggatggagggagggatggatggatggaggatggaggaatagagggaaggaggatggagggatggacagatggagggatggagagacggagggatggagaatggagggatggagaatggagggatggagagatggaaggagaatggaggatggaggagggagggagaatggagggatggagagatggagggatggagagatggcaggatagaaaatggagggatggagagatggagggatggaggatggagaatggaggatgaagggatggagagatggagggacggagggatggaggatggaggaatggagaatggaggggtggaggaatggagaatggaggggtggagggatggagggatggagggacggagggatggagggacggagggatgcagggacagaggcatggagggatggaggaatggaggatggagggatggagaatagatggatggagggatagagatggagtgatgaaggatggagggatggaggatggagagatggaggatggagggatggaggatggagggatggaggagggatggaggcaaggaggatggaaggatggtgggatggagggagggatggatggagggagggatggagagatggaaggagggatggagggagggatggagggataaagggatggagggatggaggggtggaaggagggatggagagatggaaggatggagggagagatggagagatggcgagatggagggatggcgagatggagggatggcgagatggagggcgggagggatggagggatggcgggatggcaggatggagggagggacagagggatggcgggatggcaggacggagggagggatggagggagggatggagaatggagggatggaggatgaagggatggcaagatggatggagggagggatggagggatggcgggatggcaggatggagggagggatggcgggatggcaggacggaggaagggatggagggatggaggagtggagggagggatggagaatggagggatggaggatgaagggatggcaagatggagggagggatggagggatggtgggatggagggatggcgtgaacacagccaactgccaattgcaagacccaggcggtaagtcgtgggtctactgcccaattctttcaacttttcagcacttttgaaaattctctttaaaaatccctttcccccaggggaaaggtgagtctttaccttggacacaggtgttttcaagctctgaagaaacacggtttttgagggaactctgcttgaggaacctgagtggggacacgggtcacagaggatgcccccaagctccagtgggccgggccctgtgcccaggctccccacccagcaccacacctttgaggggcatgttcctgcctcaggggccttgcgcgtgctgcgcctgtgtccctgcttggccggctcctgtcctcccgtttgggtctcagcctctcacctccccagggagaccgtcctcacagccaccttcctacccgccttgcatcccattctatttcctcacactgcacatcagttgggactgatcttgctccttcctgtgggagcacagacctggcgtctcgttcacggttgctctcccagacctactcgctactcagtaggggcgcagcagcaccggtgaatggagctggggcaggcgggctgggctggatctgggagatccagaggggtcctcagctgtggagggggagcactggagaggacgtgacctgggacctgggctcaggcacacagtgagttggctaccaagatggggcatcaggaagaagcacaggcttgggtcagatgtgctgagcagtcaggacctgcagggttggaggggcccaaggggcgccctggatgtggcttgacgtgctgcgctgggcacgcatggtggacggagtggtggagcaggcaactggagcctagaacgtgcccggcatgttgcagacgctcaagaaactttctgcagcaaacgaagaggcagatgctgtgggagacactgcccgggctatggtggggtttgggggatcccagctcctgccctctggccctgtgagaacaccctggctacagccccctcggggggacgtggcaaaggcctgaagccccacaatcaagcctggaacaatggccctgaagtgactacaggctagttcttaccctgaagatgcactctcttctgattctgagactcccagcgtggtgaatggtgtcaggtgattgtctgttggctcgttcatccgttcatccatccatccatccatccatccaaaccaaaatcagcaagcatctcttgggtttgggggatgacacaccactgaggcggccggctctctgtctaaatgcaactgtcttttcttttttcttttgagacggagtcctgctctgtcgcccaggctggagtgcaacggcaccatcctgactcactgcaacctccgcctcccaggttcatacgattctcccgtctcagcctcccgagtagctgggattaaagggatccgccactattctcagctaatttttctatttttatagagatggcgtttcaccatgttggccaggctggtctcgctcctgacctcaggtgatccactcactttggcctcccaaagtgctgggatgacaggcgtgagccaccgcgcccggactgtctaaatacaatgtctaataagaaaaggttttaagcacctggaaagcacagaatcacataaaagacacccatctattactacataggtcaaaaaacatcttttctgtttatcccttaagtcaggggtcagcaaacttttgtaaagggtcagaggagatcaggcggaggccaggatctcctctgggacaggctttgagcgtggccctgggggtggagggagtgaccgaaatggaggtctcaccaggggagactctgccctccagggcacactggttgatgtctggggccatttgtgattgtcatgactaagggtgctcctggcataaagtaggcggaggccagcgacactgctcagccccctgcagtgcccaggatggccctaccccagagaaagatcaggtcccacaggtcggcagtgctgagaggcagagaccctgttttagagactgggatggtagaatctcgcccctgttcgccccccgcatctgcacacacaagaacccggagtcaacacagtatggaggtatgtgggatgggagtgggggcgggcagggtgttcctgacactattctccgggtgtgtacaatgtttcaggaaaagaacacccgtacctgtaccaccctgtccacttttttttttttttttgagatagagtctcgttctgtcgcccaggctggagtgcagtggcatgattttggctcactgcaacctctgcctcctgggttcaagcgattctcctgcctcagtctcccaagtagctgggattacaggcgttcaccactaccacctggctaatttttgtatttctagtagcgacggaattttgccatgttggccaggctgatctcgaactcctgacctcaggtgatccacccacctcggcctcccaaagtgctgggattacaggcatgagccaccgcgcctggcccacttttgtcttttgtttgaagttccctgtaataaaagctgcagctcgtacacacatccccccgcgggctggtgctctgcaagctgcgtctctgaccctctcaatgctccatgaggtgactggcattggacctattttacagctatgtaaactgaggctcagaggtctctgctagtcaaaggcagcaacattcgctccagcctggacttgaagggcaaacggcagccccagggcagcccctgggggagggcaaacagcagccccagggcagcccctgggggaggagcaaacttaaggcacattcttcagataaactccagggggtcacttagccaaacgagccctggggcctgcgtttggtcctctggcccctcaggcccaccaggatccaaagcgaactccttccccgtcagcctggcgtgtaggaatatgcttccacgagcccagattgcagagcctgctgcacgctgcatgctggtctgaccccgtcaccacccccaccaatagcacagagggagacaaagagaaggtgcctaacatttcttagaaaaggcatcgtgggccaggcacagtggctcactcttataaacccagcactttgggaggctgaggcgggtggatcacctgagatcaggagtttgagaccagtctggccaacatggtgaggccccgtctctactaaaaatacaaacattagccaggcatgggggtgcgcgcctgtaatcccggctactcaggaggctgaggcaggagaatcgctcaaacccaggaggcagaggttgcagtgagctgagatcgcaccactgcattccagcctggacaacagagcaagactccatctaaaaaaaaaaaaaaaaaggcattgtgggccaggcgcagttctcatacctgtcatcccagcacacttggaggccgaggtgggaggattgcttgagcccaggaattccagaccagaccgagcaacatagcaagacatagcaagaccccacctcttcaaaaaacaaaaaaattatctggcgtggtgacgtgtgcctgtagtcccggctactcgggaggctgcggtgggaagactgcttgagccccagagttggaggctgcagtgagctatgatggtgacactccatttcagcctgggtgacagagcaagactgtccctataaaaaaattaaaaaaataaaaaataaagagcagaagctctcttggaagcggctcctccagccccagttgagccttcagaggaggcagtcccggctgacagcttcaccacagcctcatgagagaccccgagccaggaccacccagctacgccgctcccagactcctgactcagaaactgtgtgaggtcacagatgttgcctcaatgaacgtttgctggacagaggcccagatggagaacacctcccctcctccccctcccctcccctcctgtccttcccctccctcctctcctccccctccctccccacaccaggcttggtcctgccctagggcctccgcacaggctgcgcctctgcctggaactctctctcccacccaaccttgttcaggtctagatcaaatgtcacctcctcagagagtcccctccctggtcaccctgcccccgctgggtttacttctctctactccttggatcctccacatttgttccctctgaggccatgagcccggccagggcagcgacttcatctttcccctctgcaacagtgcagacagcacgagcctggcacgtgggtaaggctgcctgcgacagtgtcctcctcccaggagttccacggagatctgggtccagggcacagtgggcttggctcaggagggaaacggggttggatggggtcaagagcccaggggcgcaggctgcttcccgtctctaaccactgagccaccctggaacagctggagcgcaggcaggagctggccagagacgagctagcccaccttcgccgtgtgtgtggcggggcccgcaccatatgagaaccccatggcttagtcacgcaattgtcccaacaaccctgtgacgtaggcactattactgctcccattatgcagaggcggaaactgaggctcagagaggtcagatcgcttgcctgatcatgcagcaaaaatgtaggggtggacgcacctgattccaggatgtcaggccccagtctgcgtcaccacagcagggacgggaggagagtgaggaggagccaggcgggggaagggcagaggggcctcccaggcagaggcacagccagtacggaggccccggggcaggaccgtgtctggagagctgggatcagcccgggcacagcaggaacatcctgtgcagagcacagccagcccccgcttcccctcccgggcagtcccacacctcccccacactggagcccctgcttcccctcccgggcagtcccacaccccccccacgctggagcccccgcttcctctcccgggcagtcccacacctcccccatgttggagcccccaccaccccgaccagtgctgactctgtctctgcagcaggcccggcccccagcacaggagaggcagagcagatgcttcggtgcctggagcagcacccacagcctcctggctgggaagtggcctctgtgtcacccactggacctcaggattcctcaaaataaagacggaacgataagaagagcctcccgctcacagcgctgcagtggtaaccacaccagtcacgcatgagcatttctttgccttataattagaggcatcaagatgagctcattgccgccccctcaccccacacacatcatccagcgcacaatctcacagcactcacacacagatggggacacctgctgcctgccagggtcccttccatcccggggacagggccgaattccttccccttgaaagtgggcgggtctcaagccctgctttggccaatcacatgatgcagaagtgacatggggggaattcttccatcagcctctgctctcttggaatccctccagtacgatgctggggccaggctggagggtggcagcaatgcggagagaggcctgggacaggaggccaccagggtgtgctggcacaagccagatgccgcagcagaaccgacctgctgagcccagccaagcccagccaatactgggaaactgacagcaaaagcactgcagcgtgaagcctctcagtgtggcagtggtttgttgcataatccacgaatcccaccacagacgcacccagagcgggaccaccacctgctgaaggtcacccggcacgtagggcccaggcagcaaagccccgggcggctctctccctctgagcaccaggatctggttccctgtgacccaccaggagaactcaagctcttagtgccacatggcttccaccactgtagacacgtcactcagcagtcagggccagacacgtgaatcttagaaggttccaagttatttctgggtgtgggatgggggagggtctcttaatttgcaacttccatcctttggtgccgtctgaaatacatattttgtcatttttatttatagaaatgaggcttttctcaaagcattaactcactcaacttgtaaaacaggcagaggaaaagaaaacaaacagtgtgaacatctgaaaaagacgcccagacccctctaatgataaaagacatgatatgaaaccagcctgccagcaatgggttggggactcagggggtcctcacacggctgggggtgatgcccgtgtcaatagattctcccctagggggcagcctggcagcatttctaatgtgtgtgcccttggcagcaacttcaattctagaactttctcctagacaacttcggcacaggtaaaaagacaggagtctcgctgattatatggaactcataaggtcctacaaagactgtctaaagcaggggctggtataccacagtccaggggccgaacacagcccactaaagaaagttttattgggccaggcacggtggctcatgcctgtaatcccagcactttgggaggccgaggcgggcggatcacgaggtcaggagatcgagaccatcctggctaacacggtgaaaccccgtctctactaaaaatacaaaaaattagccgggtgtggtggcgggcgcctgtagtcccagctactcgggaggctgaggcaggagaatggcgtgaacccgggaggcggagcttgcagtgagctgagatcatgccactgcactccagcctgggtgacagagcgagactccgtctcaaaaaaaaaaaaaaagttttattggaacatggccacacccatgtgttcacgaattgtctggctccttaagtgctacaaccgcagtgtggaggagttgtgacagagaccatctggaccacaaaccctaaaatgttcatcttgatttttttgtagagacggggtcttgcactgtcacccaggctggaacacagtggtgccaccatagctctgcagcctccaactcctgggctcaagcgaccgtcctgcctcagcctcctgagtagctgggactacaggcgccaccacacctggctaattcttttttcagaaacgggggtctcgcgttgttgccgaggctggtctcaaactcctgggctcaactgatcctcctaccctggcctcccgaagcactgggattacaggcgtgagccaccgtacttagactaaaagctaaaaaatttactactcagccctttacagagtttcctagccaggcacagtgactgacaccggtaatcctagcactttgggaggccgatcctcccaaatacaaatacaaaaattagccgggcgtggtggcgggcgcctgtagtcccagctactcaggaggctgaggcaggagaatggcatgaaccagggaggcagagcttgcagtgagctgagatcacgccactgcactccagcctgggcgacagagtgagactctgtctcaaaaaaataaaaataaaggctgggtgcagtggctcacgtgtgtaatcctagcactctgggaggccaaggcgggcagatcacctgaggtcgggagtttgagaccagtctgaccaacatggagaaaccccgtctctactaaaaatacaaaattagccagacgtgatggcgggcgcctgtaatcccagctactcaggaggctgaggcaggagaatcacttgaacccaggaggtggagcttgtggtgaaccgagatcgcaccattgcactccagcctgggcaacaggagcgaaactccgtctcaaaataaataaataaataaaataaaataaaataaaataaaataaaataattacaaactggaatgaatgtaatagctaaaactataaaactacttaagaaaatggggtaataaatctttgtgaccttggattaggcaacaatttcttaaataaacaccaaaagcataagcaagcaaagaaaaaaacagatcaaggccaggtgcagtggctcacaccggtaatcccagcactttgggaggccgaggcaggtggatagcctaaggtcggcagttcgagagcagcctggccaacatggtaaaaccctgtccctactaaaaacacaaaaattagccgggcatagtggtgcacacctataatcccagctactctggaagctgaagaagaagattggcttgaacccgggaggcagacgttgcagtgggctgagatcatgccactgcactccagcctgggtgaaaagagtgagactccgactcaaaacaaaaacaaaaaaaattagccaggcatggtggcacatgcctgtagtcccagctactcaggaggctgagataggagaattgcttgaacctgggaggcggaggttgcagtgagccgagactgcgccactgcactccagcctgggtggcagactgagactcagtctcaaaaagaaaagaatttaagaaagaagtccaagtgtgcaataaggaatatgtcccaacagggcaggaaaggaagaaaggacccacaggtgcagggagcggtgagggcctgtgggaaggggacacagacgcacatacacgcacacatgcacatacatgcacacatgcacacgcacacacatacatgcacacatgcacacgcacacacatgcacacgcacacacatgcagatacacacatgcatacacgcacacacacgcacaggccctcagaggacaccacagaacacctgcgggacacagcaaggaaggggtgaggtggctggaggggagggtacacctgggggaccccagcacggtggagggacagcctggggtccacccgagtagtaggccgcccctcttccttgccccttctcccttctccctgccgggtgctccccgcagggcatagagtgatcgctttccccgcagcaggtgggcgggcaggagccaggccggtaaacaggaagctctgcgcaggcgggcggagcatccagaactccgcaggccctgaggtgttgggtcgtttcccagggccccaatgtccagggagaaagaggctccactctcagcaccaagctcccgggcgggccggggcaggaggctgtggggcgtggccagcccgcaggtggcggggccgacgggatgggtcagggtgcacagagcacacgccagcccctgggggaagcccggcccgtgcgggctgcgggagatcctgatgggccccgagctgaggctcccgcagccagggtctgcgcgtggtccccacctccttgcgcgctccgtctccagcacagcagaggtggacgcccctcgcggctggctccccagcgtccctgtcctccaggggcgcagcgtccctccggggagtacagtgtccctgaagggaattccttccagagcctgaggttaggccgtggtgggaaacagagcggggtgccgcaggggagcccgcaggagctcctgttcctcacctgcgagggggggacggcctctggccccctgctgtgggcggggagggatctagaagaccggaaggctatttccagggcagcacccccaggactctggggcacacacgtccccaggcagctccggtgaggccaccctcgccccctggtttcaactcctgctgtgagcacctggcctttccctggtccactgagagccgcgtgtgttttttgcggttttgctggtgattctgctgctgaaattgcccccccaggcattgtcctcaggtggtttcgtgtccctcagggctagagacccggatgagccccatggagaaacccgtagtgagagaagctttgctcaaacaggactgagagcggaaagagagagagagagaggagagtggggggagaacgagagcgagagacacaccgagctggtgggccgggggagggggacccacacccacgtcgccatggccccccaccccgtttttgagcccccacacagccgaatacatgcccccggtcccccttccagccttgtccccaacacagcctgcaaatgggcgggggcctgggagagtgcccgggatggggctggggggtggggggggcttggcgcacgcggcctatggtctgtgagctccctgtggataaatcaacaacacgggtgtctttaaaattttcttaggatctcactctgtcgcccaggctggagtgcagtggtgcaatcacggctcactgcagcctcaaactcctgggctcagtaatccagttattctcccacctcagcctcccaaagtgctgggattacaggtgtgagccaccgcacccagccctaaaataacacgccttgaaataaaaacgaacatacaacaaggtcacgtatcgactggctgatggaaacatcatgcccagaggctcacaggaacccgaccttgggtttcccctggagccagggctcagtgtgcgcctgaagtgtctgcagcagcttcacaaaggaactaccacaaacaggcctggcgcagtggctcatgcctgtaaccccagcactttgggaggctgaggtggctggatcacaaggtcaggagttcgagacccacctggccaacatggtgaaaccctgtctctactaaaaatacaaaaattagccgggtgtggtggcgggcgcctgtaatcccagctacttgggaggctgaggcagcagaattgcttgaaaccggaagacagaggtttcggtgagctgagatcgcgccactgcactccagcctggacgagagggcaaaactccgtctcaaaaaaataaaataattaaaataaaataaagaactaccacaaataatggaactggctgcttcaggcagagaggtaccatgccagcaatcaacacgcaaatggcctgacataatcacacacgcacacgctaacacacacacactaactcacatgcactctcacacacacaaacttgcacacactaacgtacactccccccccacacacagaatgataaagacatggcaaaacgttagcagctggtggatctctgtgcgggctgtacaggtcttcactgtagcattcttgccccttctataggctggaaagctttccaaataaactatttttaatagcctaatataatctgagccccaagtgtatgggccagagaaacacctggggtgacagtcattatctccacagagatggagagggtgaggtgggactcactttttactcactgcaagtctgattactttttttttttttaactgtgaacatgttatcatttgttcaagacgagacatggctgtagcatgaaggtaaaggcagaggagtggagcagaataaaaagtccagaaataggctgggcgcactggctcacacctgtaaccccagcacatcgagaagccaaggcaagaggatcacttgaggccaggagctcgagaccagcccaggcaacatgggaagaccctgtctccataaaagatgaaaaattagctatgcatggtggcgcacacctgcagtcccagctagttgggaggctggtttgaacccaggaggtcgaggctgcggtgagctacaatcgtgtcactgaactctagcctgggtgatacagcgagaccctgtcttaaaaaaaaaaaaaaagaattgaaatgtgaacaaaaaagaagctaagttataaaagtcttagcagaatttaatcataacctcagaacaggaagactttcccattcatgacaccaaactaggaaaccagaaaaggaaagagtgataagtttgaccacataaaccccaaaatacctgccagacgttaacaatcatcgtaggagaagatgggcaaagaagtacctgcacttgtgtcaccaataaatgagtagctgccataacaaataaagagctcctacgaatcaacaaaatggtgacagataactgtagactgggaaagacacaatcatacaggtcccagaaaatgaggtcagagttcaacctgacgtgtgtgcttacaagaaggaactgtgcaaggaaaatgggccggggagggtggaggtcggggccacggagcttgcaggagctgaggcagctcagagccagcctcggtggtgaccccgtctccctggtggggacactccattttccagctcttgatagaaacacaggtgaccgtcgggaggagtgggagggagctcctgtgtggcgagtcccttcgcctctagtggtctctgctccccttgtggaaacgcagttccaagaaaacaaagaggaaatgctgcgaagagccacaaggactttttctctgagtcacaagaagacgaatatacgctgcaatgacgcagtgagggaagaagtcgccttgcacccatatggctgctgaggatgggagagatggacgcgtcctccgctgccggaacacggagcgcccggtctggtacagtgctgatgctgcgttttgttttctggattttacgacatcttgggggcctcgctaatctggggatgacggccccttccagggtaagcggattcctaaacgttgcaaacggcccgcctgcgagcacactgtgacgtgcagagcaaccaaccgcgagcccacgcacctgatcaaactctcacgcgccacgcccaggttccctgccctgaatcaccccagggccagctcccagaacagggaccaccccaacagccaagagccgcaaacagtcgggagtcaaaccagcccatcctaggcacacccagcccatctaccccgcctggcccgtcccttccaaccaaagcctcgggaactgtaacacaagagcttttcaatagcagtcacctcctgctctcttggcctcaccaggcctgatttaaaccaatcagagtgcatctgaatacacgtaccacctttctgggttacagaagcatagagcctttactgcactgggggtgacagcacctccgtcaacctgggatctgagagatcggggagcaaaaccaccaaagcccccaacacaagcgagaaatgagcctctgggatggccgggagagtggggatgtttgttttagcagcagacgccaagccaggctggctcatacgcgcccacaggcacaggccccgaggcagctgctcccaccccaggctcttttccctgccccagcagccccgcccatgtcagcgcatgcaccgtggccagtccaagcaccgcacgggaagggtgcacagtgggagctgcccgctcacgtccctgtccccactccctgggcgcccaccatgggcagggccggctctgagccttttgtgtgcattgactcatctaatcctcaagggacattgctttccaaatgaggaaactgaggcacggagcggctgggcaaccgaacccaatcatctcagctgtcctcctgccaacagcacaatggaacagagacaccgtccactgagcacagccaccaccagggtcccgacggccccacccagtcccactgccggctcccaccacggcccccaacgctccctacaggggctcctggggcctccctcgcagctcggccatgctgggccccggcggcccccatgctgcccttcctgcatccatcttggctgagggcagctctgtccttccagggctcaggctaaaatcttgatttcaaactcaatcccccctcagccccacactcaaccttcaaaaggtcctgctggctctgcttccaaaatccatcccagatggcgcactgctcatggtccccacctggcccagccccagcttcgcccacctgggccagtgcagtcccctctgccctggttcccctagcccacgtcccgccctcaccccatctgtcctccccacagcagccaccagggggtgcctgtgagctcctgagtctcgcccatccctcctctgcccgcagccctccatggctcccacctcccttggggtcaaagcccaagtcctccctgcagcccacaaggccctgcacaccctgccccgtcccctccctgccctcccctcctcactgttcctctaaaacaccaggcgtggtcctgccccagagcctttgcacagtgcctctgccagacagctccctccacacttccacaaccccctcacttcccctggatctctgttcaagtgtggcccccgagtccccagccttgagggcacctccgccgccactctctcccctcctctgctcggctcttctccgtggcacttgtccactgcgttgcgtgttttgcttttctttgctgtctgtatgtcctggccccactcccagagttccttagggggcctggccctctcgttcccccaggctcccagcacccggccacagcacacgcaggaaagcacacgtagacgatgcccgaaccacaccccactcccggaaaccttcagcagcagccctgcctgcaaagtggaggcatgaggcatttcagtggaggagagcggccgggcagggtgctggggtcctctcttcactcagccagaggccgggtcccctcgcacccccatgccagctcaggcacctgggggccctcatgctcgactccagcccctcccaagctggcctctcagggtggcggggaggcaggtgcaggggctccgagctaatcccctcaggctgtaatccccatgagtactggcaccaccacgggccccgtccagctggcgcctgctggcaaatccttgcagggtcttgaccggcctggtcctgcgtgaagggacatgctgccggggccaggcggcaggcggcaggcggcagggaggcctgggccccgctcctcgttcacagccccaccctgtgtggactctccagccctcctggagcctcggtttccccatctgtaaacaaagacccaggtcgtgcagcttcccaggggctagggcctcacccatccctgtcctgccaggcactcaggacacccgcagctcttgttccaaaagggaaagaaggggccaccatgggggcgcatgcctgtaaccccagcactttgggaggtggaggcaggagggctgcttgggaccaagggttcgagaccctcgcaccctggacaacatagtgagacctcacctctacaaaaaagttttaaaaatttaaaagaggctgggcgcggtggctcacacctgtaatcccagcactttgggaggctgaggcgggcggatcaccaggtcaggagatcaacaccctcctggctaacacggtgaaaccctgtctctactaaaaatacaaaacattagccgggcgtagtggcggacgcctgtagtcccagctactcaggaggctgaggcaggagaatggcgtgaacccgggaggtggagcttgcagtgagccgagaacgcgccactgcactccagcccgggcgagacagcgagactccatctcaaaaaaaaaaaaaaaaaaaaatttaaaacaaagggaagtcacttgctcagaggcacacgggtctaagcggccaaggcaggctcagcccacaccaggccctgggaccaccctgcccaggctcccggagcctccacctgctttgggggtccccactgcctgctcaccccacatcggcacacacctgccacagtgcctgggctcccagtcctgctctgtcctcagtcctcgccaccccagccaccagctccagggcccaggccaaaatccttccaggcccctcgtctgcctccaggcaccggtggcactcacctggacacctgccccaaccccacagagcactgcccacggaccatcccccaccaggcgctgtgaatcgggctcgccgccccactcagatgcccgtgccacccgctgtcctcaggtccgaccccacgcgaccctctcccaccacgttgacttcacttctgcggctcaagtgggtgcagcaagttcccaccccacggcctcggcgcgactattccgctgcctacatcgcctgagccacagcccacccttattcagctcgtggggacagtcacctccctccgagtcctcagctgccgcaggcctggccacttgacctcccaggtgccctcaccacactcatcaccgcccaacgcagcccggctctgggctgggcaaacatcttccgtaaaggaccgggcagcaagtgttttcggcttcgtgggacacgtagccccaagcatggccactcagctcccagctctgccgctgcagcgtgggggccaccaaggccggcaacggaacaaatggtgtggccgttgccaataaaactttgttgacaagaagcggcatggacagattcgggtggggtctcacgtggccacttgttcccatctgcagcctgacgcccagcaacctgagggctccaaggggtcagcgaggcagtcccgttagcaccagaagactgggcaccctgagccccacctggcccacacgaggtgctcaacaaaggtctggagcccaggagtggaactcacactttcacgagccgactcccatggcggaccccagcgcccaggtgagctcgcttggcacctgggccccggaagcagcacacgaaggggactccctctcctccaacagcaacctgggacggagggggcacccagctttctcacggggccggctgcctgtcccgtgccttctaagggctttaccccatgattctccatgcagcccaggagaaaggcagccatcacgcccactttacagacaggtacaccgaggctgcacatccccggctggcatgcaatggcgctgggtgtgaacccaggagggccggcccccgaggcctctccactgggacacccaggctgtggtggtcacagtgcctgacctgcatcccgggaggcggccagggcgggagagaatggggaactttccgtccccagtgtcctcagcctccgcctgggccctgctgacttgcaacaagagacaccacaatcccactgacccttttttttttttttttttgagatacgattctgctgtcacccaggcatgcagtggcacgatcacagctcagtgcagcctcagcctcccaggctcaggtgatcctcctgcctcagcctcctgagtagctggaactacaggtacataccattacgtctagctacttcttttaatttttttttagtagagacaggggtcttgctatgttgctccaggctggtctcaaactcctgagatcaagtgatcctcctgcttcagcctcccaaaatgctgggattacaggtgtgagccaccgtgcccggcctccctgacctttttacacagaccaccacagctacagggaggccctggtggcggtgctgactccctgcccggccgccctgtgaccacactacactgtgctccaggcaggcggggcctctgctggggccatgccctcttcctgcccaatgcccacaggtctccctcggatgccaccttcttggcaaggccttcccagccaccccattctaccttacccttcctccctggcactgctggcctcatgcacctgatgttcaccaggatctgcactgtgctgagctcttccgggcgcaggggatgccgcaggagtggcacagacggtcttggccctcgtggagctctcgctcaggaggagatggtcagaaaacacgtcagcagagccatatgtttcaggtggtgacaaacgctatggtggcacaatcagggaagaggaaccgggagggcaggggacggagaaggggagaccgctgtgtggtgacagcagggcagggaggcctcacggagaggagatgctcccacaaaacctggaaagcgctaagggagcaaaggacacagatgggaggaggggcattccggggtgggggtggggggcagccgtgcaaaggccccggggcaggaccatgccctgcatgctggaggaacagcaaggggcccatgggcctacagcagagtgcagacgggagggcagggagggcagagtgcggaggggagggcagggagggcagggagggcccggggcaggctgtgcagggcctgatgggcttcaaagaggactatgtctttgaccccaagggaggtgggagccatggagggctgcgagcagaggagggtcgggactcgggccgctggtttttaatggggtcctcctggaatgtgggacagggagcagaggaagagcaggggcgccaggcctggctcagggggcaaaggaggactgagctggaccgaggaggactgagctggacggaggaggatcgagctggaccgaggaggaccgagctggacaaaggaggactgagctggaccggggaggaccgagctggaccaaggaggaccgagctggaccgaggaggaccaaggaggaccgagccagacgaaggaggactgagccggacgaaggagaaccgagccggacagaggaggaccaagctggactggggaggactgagccggatggaggaggactaagctggaccggggaggaccgagctggacccgggaggaccgagccagatggaggaggaccaagccggatagaggaccgagccggatggaggaggactgggccggacggaggaggaccgagctggaccggggaggaccgagccagacagaggaggactgagccagacggaggaggactgagctggaccggggagtactcagccagacggaggaggaccgagctgtacggaggaggaccgagctggaccgaggaggaccgagctggaccggggaggaccgagctggaccagggaggaccaagctggacccgggaggaccaagctggacccgggagaggcagaggacagggaaggagtcagtgggttctgggccagttctgaaggtgaagctgccatcatttgctgccagatcagccgtggaagtggggcaggggcagggatgcagctgacctttccagggcatcacagagacagatcagccgtgggagtggggcaggggcagggatggagctgaccgttctggggcatcacagagacaggacagcctgggagaggctcagacacgcccaggccacagctcagaccaaactccaccacaggccatcggcccacacagtgggcacagccgcatcccaagccccggccttcccgagaccgcccccacgtgccccacggccacggcccatggagacgccattcaggccacgcctcgggagccaggagcccaggcaattagaggaaccaaattctaaacaccaacgagacattgctttgcctcccatcggatcagccgaaatcgccaaggacgatgacactgggagctggcagtgccgtgggaaacgggcagcctccctcggcccctgtcggacaaggctcccgctgtagctgagctttctggaaggtgtcgccatcgcttctaacagtgagcggtgactccagaaaccacgggcatgggcctcagcaggggcctggaggcaccgatggtggagaggccggaaaggggtggccaaccggcacgacaatcaccaagcacgagcgccaactcatcccaggctcagcccctagcacacacggtcatcaccccacttcacagacgggacgctgaagcccggggaagtgacggccacacagcacctgaagcgcggagctgggagggggacatcggcgggaccaactctggggctcccccttaaccactgcctggcgctcgccctctctacaaaccgataccaacatagggtggggagactccagatgaccagagataaaaagcaagcagttcacagagtcataaacgtgtggcatttctcaccagggccgtcctgcccccaggggacactgaacggtgtctgggtcacttgtggctgtcacaactggcaggtgctcctggcatggagtgggcagaagccaggggcgttgctcagcacccctaatttcctgactcaaaatacctctgccaaggcacagaagccccagtgaggcatgaaaccatctcggtgaagaacaagcaggcccctttatgtgctcacgtctctgtggcccagccaggcacaacctaaactcaccagcgctaacatcaggagggatggcgttggaggagtgaggcaactctgaattttaaacattcagaagcagtatatggccagctggggtcagatttctgtggatttcagggatgggcagagatgccagaccctgaccttccagccctccccggccccccacccccacccccccactcccccgctctcccaccccaccaccatgctcagtctggagctggcaactttatctgtccccggtgctcccagagcccctgataagatgaatggtcgcggtgtggttttcttttggtcagcgagtcctgggctactttgtctctgaccagctggggtcagagggctgacagcggaagttggggggcccaagaaaggaacccgggctggggcctggtgccctgcctgggttcctccaccatgtctcttgctggccaggccaggacaccggctgcccgcaaagaaaggggcgaggccactggctctggggaaggaaccgggtcacctaccaagcggttccagatggccgccgggagggaagccacgagtgtctttcaaggcggggggtgggggggggacttgatgacttccacactctctctctctccagacatctccccaactcccaggcagcacgcatcgcccgcccgcccgcttgcccgcctgccaaccaaggaagcttcgggaggcctggggggagaaggaggacggatgcccgtgtgggtgtctacagagacgctgctgctggctgcctgggaggagcagaggattttgtgaatccggaaacttccgatttgggagcttgtgacctcgactgagaaggaactgttcccttcctctgggctctgcacaccgtccccacagaagggaaggcccagctgccgccacctacccggctggaggtccaggaagcagctaaagggggcatgagacagccgtgccccccgcccagcccgcagccccaccagtgtgtcctgggggaaggctcggggagaggaaaagggggcgacagggcaccctgtgtgcacagccggggcggtggaggcatcttgagatgtaacccttttcctcccctcattttagcagggaggtaaactgaggcccaggaaggtgaggaaaggtcgcgcacccggactcaggtctggggacttacagaaagggaggtgacatcaggaggtgggcacgcacggcctcagagacccccgcctccacccaagcagccgccactcacacgacgggcagcccctgggagcgggtcaggcagaacggggatccccagcggcgcccacgccgagtcgcccccggcccgggagcggtgggaggtagcccctcgcaggcctcccgcttcccggcgcggcttcagccccgtcctccccgcggctccaggggactgccccgccccaggctcctggaaccggcggcgcccccgcagcgaccgtgcagcccccgccccggccccgcagccccgcgactctcggcgctcggacgagcccagcgggccgcagccccgggaggccgggccgttacctgccgccgccccgctctctgccgcccacgccgcctccgagggcacggcccccgcctcagcgctctccgcctcgtccggtacctccagctccatggccgcgcgcggacggcggcgggggcgcccgagggggacccgagctgcgaccgccgccgccgaacaacaagcgccgccggccaagggagggcgcgccgggccggcgcggggcggacggggcggggcctgcgtgcgtgcgacgccgcggacggcgcgcggccaatcggggctcgggggcggggcctgcttgcgacccgcagccaggagcgcctcgagtgccccctcgcgcccaggggtgggagtacagagccaggctcgccattccatcgtattaggtcagtaagattgacaggcacgatacgtatcaataacattgctgtgcacaacacataccaataacatggatctacacaacacatgacaataatatggatctatacagcacgtgccaataatatggatgtacacagcacatgccaataacatggatctaaacagcacatgccaataacagggacctgcacagcgcatgacaataacatggatctggccgggcgcggtgactcacgcctatattcccggcactttgggaggccgaagagggcggatcacctgaggtcaggagttcaagaccatcctgaccaacatggtgaaatcctgtctctactaaaaatacaaaaaatagctgggcgtggtggcacatgcctgtaatcgcggctactcgggaggctgaggcaggagaatcgctggaacccaggagggagaggttgcagtgagctgagatcgcaccattgccctccagcctgggccacagagtgagactctgtcccaaaaaaaaccacacatggacctacacagcacatgccaataacatggagttacccaatgcatgccaataacatggatatacacaatacatgccaataacacggatatgcacaatacatgccaataacatggatatacacaatacatgccaataacatgaatctatactatatcattgacatggatctacataaaacatacaaatagcattgctatatgcaatacatgccaatcacattgctatacacaatgaataccaataacattgatctacacaatacatgtaactaacattgatacacacactacatgtcaataacattgatatacacactacatgccaataacatggatatacacactacatgccaataacattgatatacacactacatgccaataacattaatgtacacactacatgtcaataacattgatatacacactacatgtcaataacattgatatgcacaaaatataccaataacagtgatatacacagtacatgtaaataatattgatctacacagggccgggcgcggtggctcatgcctgtaatcccaagactttgggaggccgaggcgggcggatcacgaggtcaggagattgagaccatcctggttaacatggtgaaaccccgtctctactaaaaatacaaaaaattagccaggcgtggtggcgggcgcctgtagtcccagctacttgggaggctaaggcaggagaatagggtgaacctgggaggcagagcttgcagtgagctgagatcgtgtcactgcactccagcctgggcaacagagcgagactccatatcaaaaaaaaatatatatatatatagatctacacaatacatgttattaacattgatctacgcaatacatatcaataacatttgcaattaactacctgtttattatcatattgcaaataatatttatattccatcgtttgtattacgtaagtatagatatgttattgttttctttatattattttatcaataataatacagtttgctattataagaaacatataattatagaaatacataataaattatatatatttatgcaaatgtaagtagcaatatttatatccttcttttttttttttgagatggagtcttgctgttgttgcccaggctggagtgcaggggggcgatctgagctcactgcaacctctgcctccagggttcaagtgattctcctgcctcaccctcccaagtaactaggactacaggtacgtgccaccacgcccggctaatttttgtatttttagtagagatgaggtttcgccatgttggccaggctggtcttgaacgcctgacctcgtgatcttcccgcctcagcttcccaaagtgctgggattacaggtgtgagccactgcgcccggccatatttatgttctttatataagcacataataaggcttatgttgtttatgttaatttaagtaataacgtttatattatttacataaatgtaaatcataatgattatattacctatgcacataaataatgtttggggtgggcacagaggctcccgcctgtaattccagcactttgggaggccaaggcaggaggattacttgagctcaggagttctagaccagcctgggtaacatagtgagccctctcatctctacaaaaaaaatttttttaattagctaggtgtagtgagacccctcatctttacaaaaaaaattgttttttaattagccagctacttagtaggctaaggtgggaggactgcttgagcccgggaactcaaggctgcagtgagctatgatcgcaccactgcactctggcctgggcaacagagaaagaccccgtctgtccccgcaaaaaaaaaaaacaaacaaaaaaaacaaaaagacaaattctgtgtggttccactcctaggaggtccctagagttgtcacattcacagagacagaaagtaggatggggggtgccaggggcttggggggagacgaggagtgagtgtttcacaggggcagacttccagtctcagaagatgagaacattctggagatgatggcggtgatgtttgcacagccatgggaatgtgcttaaggccacggagctgtgctcttagacatggtgaaaatgggccgggcgcgggggctcacacctgcaatcccagcactttgggaggccgaggtgggcggattacctgaggtcgggagttcaagaccagcctgactaacatggagaaaccccgtctctactaaaaatacaaaattagccaggcgtggtggcgcgtgcctgtaatcccagctactcgggaggctgaggcaggagaatcacttgaacccgaaaggcagaggttgcagtgagccaacatggcaccactgcactccagcctgggcgacagagcaagactctgtctccaaaaaaaaaaaaaaaaaaaaaagaagaagaagaagaagaaagaaatggtgaaaatgggccgggtgcggtggctcacgcctgtcatcccagcactttgggaggccgaggctggcagatcacctaaggtcaggagttcaagaccagcctggtcaatgtggtgaaaccctgtctctactaaaaataccaaaaaattagctgggcatagtggcacaggcctataatcccagctactcgggaggctgaggcaggagaatcacttgaacctgagaggcagaggttgcagtgagccaacatggcaccactgcactccagcctgggcaacagagcaagactcgaaaaaaaagaaatggtgaaaattgtgaattgtatgttgtgcgtattttactaccattttttgttttttcttttttgagatgagtcttgctctgttacccaggctggagtgcagtggcgtgatctcggcttactgcagcctctgcctcccaggttcaagcgatcctcccacctcagcctcccaagtagctgagaccacaggtgtgtgctaccatacctggctaatttttgtaatttcagtagaaatgggatttcactgtgttggccaggctggtgtcaggtgatctgcccacctcggcctcccaaagtgtgaggattacaggcgtcagccactgcaggcggccttgaccattttaaggctccaggaagagttctttggacgcaggtcatggacagagctcctgattcacccagaatctgttttgaaaaaagatttagaccactggctctcaaggtgtggtccctgggccagccacatcagcctcaccctgggagcttgttagaaatgcaggttccaaagccaggtgcagtggttcatgcctgtaatcccagtgctttgggattgaggctgaggcaggagaatcactttagcccaggagttcaagaccagcctgggcaacatagcaagatcccatctctacaaaacaaattaaaaattagtctggcgtggccagatgcagtggctcacgcctgtaatcccagcactttgggaggttgaggcaggtggatcgcctgaggtcaggagttcgagaccagcctgaccatcacggagaaaccctgtctctactaaaaatacaaaaattagtcgggcatggtggcgcatgcctgtaatcccagctacttaggaggctgaggcaggagaattgcttgaacccgggaggcagaggttgcagtgagtcaagatctcgccattgcgctccagcctgggcagcaagagcgaaactcctctcaaaaaaacaaaaatagcctggcatggtggtgcacacctgtagtcccagctacttgggaggctgaggtgggaggatcgcttgagcccagaagtttgaagctgcagtgagctatgatcacaccactacagtccagcctgggcaacagagcgagacctggtctcaaaacaaacaatgaaaagtaaaagaaatgcaggttcctaggcccccacccagacttcacacaccagaaactgggcagagtagggtggtgggagggcacaatctgggtgttcatgactcctcccttccaggcaaactgggtgccagataaagtttgggggaaggggccagccacggtggctcatacctgtaatcccagcactttgagaggccaaggtgggcggatcacttgaggtcaggagttcgagaccagcctggccaacatggagaaaccccatctctactaaaagtataaaaattagccaggcgtggtggcatgcgcctgtagtcccagctacttgggaggctgaggcaggagaatcacctgaactcaggaggcagaggttgcagtgagccgagattgcaccactgcactccagcctgggcgacagagcgagactctgtctcaaaccaaagaaaaggaaaagaaatgcagtttcccaggctccaacgcagacttcacacaccagaaactgggcggggtggtgggggtggtaaaatctgggtgttcatgacttcccccttccaggcaatttggatgccagataaagtggaggaagtgctggaggttagatcattgatgaggataatgaagaggaaatatacttaaaaaaaattactaaaactggctgaacagtcatgacttacagacgcaaaagtcaacatcaaaacaagcagttaaaagcagcctcttggccgggcgcggtgggtcacgcctgtaatcccagcactttgggaggcagaggtgggtggatcacctgaggtcaggagtttgagaccagcctggccaacatgatgaaaccccacctctactgaaaataccaaaaaagtagccaggcgtagtggcacatgcctgtaattccagctactcgggaggctgaggcaggagaatcgcttgaacccgggaggcagaggttgcagtgagccgagatggcgccactgcactccagcccgggagacagagtgagactccgtctcaaaacacaaaaacaaacaaacaaacaaaaaacttaaaaaaaagaaaactagggcagggatggggtgacaggaggggagaggcaagggacagagaggaggggctggggtccgggagagccaccagccttctgtgccttccccgcatccccccacgcccctggttggctgtccccattacgcagggtggaaaaccgaggctgcccggcgggggccggttgcgtggtttctggcgccgcctggtggccatagtggctactaccgtcagcaggaggtactgcaggctggagggaccctagtccattcattccaaaaacatgtattgagcacctactgtgtaccaggcactgtgctaggccataggacacggcagggatgagcacgacaaagtccatgacctctgtgaggtggcattttaatatttatttatttatttttcagccagcgtcttgctctgtctcccaagctggagtgcagtggcgcgatctcggctcactgcaacctctgcctctggggctcaagcgattctcccgtctcagcctcctgagtagctgggattacagacgcatgccaccttgcccggctaatttttgtatttttagtagagatggggtttcaccatgttggccaggctggtctcgaactcctaactcaagcaattctcccacctcaacctcccaaagtgctgggattacaggggtgagccattgagcccagacttaattttttaaattttaattttaatgtactggtaaagatgggggggtgtctcactatgttgcccagactggtctcgaattcctggcctcaagtgatcctgccaccttggcctccaaagtactgagattataggtgtgagccatcatgcccaacccttcctggttaattttattttattgagataggatcttgctctgtcacccaggttggagtgcagtggcacagtcatagctctctgcagcctcaacctcccagggtcaattgatcctcccacctcagcctcctgagtttctgggactacaggtgtgtaccaccacatctggctaatttttaaaaaagttttctgggctgggcgtggtggctcacgcctgtaatctcagcactttgagaggccaaggcaggcggatcacctgaggccaggagttcaagaccagcttggccaatatggtgaaactccgtctctacaaaaatacaaaaattagctgggcatgatggctggtgcctgtaatgcaatcccagctactcgggaggctgaggcaggagaatcacttgaaaccgggaggcaaaggttgcagtgggccgagatcaagccattgcactccagcctgggcaacatagcaagactctgtctcaaaaaaataaaaaaaaaataaaataaaaacaaaaaacaaaacaaaaccaacaacagccagcagcaacaacaaaaaaacttttctaggccaggctcggtggctcacgcctgtaatcccaacactttgggaggccgaggcgggcagatcacttgaggtcaggagtttgagaccagcctggccaacataggaaaaccccgtctctactgaaaaaaaaaaaaaaaattagctgggcgtggtggtgcacgcctgtaatcccagctacttgggaggctgaggcagaagaatcacttgaacccaggaggcggaggttgcagtgagccgagatcgcgccactgcactccagcctgggtgacagagggagactccatctcaaaacaaacaacaaacaaaagatatataaaaatttttctagagatgggtttcaccgtgttacccaggctggtctcaaattcccaggctcaagtgatcctcccacctcggcctcccaaagtgctggaattacaggtgtgagccaccacacctgaccctttcttgttttttagatgaggacagcaagaagcccctgtaatttgcccaaagccacacagcggggaagtggcagaagcttctgtacgtaggaacccagtcacttcgtagcagagaggcagactgcgcacagatctgcgtggggaagggagtgcgccaagccacagcctgatgggccggcgtgcctggcaggaggctcagcaagcacagagactgggcagctccagatgcaagaagcaggagggagggggactccgggagtgcggtccattcatgtctgaatgtagccaacgagggtttcctaagcacctaccatgtgcggacgcttgataccagggcctcggcggtgagggcacaggcaggagcaagctcacctctgggcaagcaggggttaaggccagttgctcccacgtgagggcaccttgcgacagagccacacacccagtcctcctgctggcccgcccctcaccctggtccgtctccctgtgtctgtggtcgtcagttccactggcaggggacctgcctccctgttgccaccacaagagaggaaaagttggtcaaacaggtggggaggccagagctacaagcctcgggttccctccccaccacccgtgccaggcaggcacccgggccctggcacctgctgcctgcccagaggccacccagcctcctagacaggtaagtcccccgccccactgtgcttttccacccagtgtgcattgtctgagctggccttccccagctgagggtccttagactcccccccaacctcccccaccacgagctgtctccccggctcctcggaaagcaggaaactgacactcctgcgtgggcatctgacatagtttcgtagggattatctgaccggcagttactgcacctggcggcctgcccaggacgctgagctggaaacttaaaagggtcattgttacctaggtggcgcagggaccggggaggcggcaaaggggcacaggttggtctctgatccccctaactgaggaggggaggggatatcagtccagacggagcctgggtttacctcctgcagcccgaggctaggaggtgacaggtgggaaaggctgcgacctcactcatctctgagcctcctggaacttcttaaaaggctcccaagttttgaaacaactgcgtctcccgccccccaacccctcaccctgttctcaccgctggaacctccaggagctttgcagggagggattggggtggcctttcttttgctaattttttttttgagacggagttttgctcttgttgcccaggctggagtgcagtggtgcgatcttggctcactgcaacctctgcctccacctctgcctcccgagtagctgggattacaagcgcccaccactatgcccagctaatttttgtatttttagtagagatggggtttcaccatgttggccaggctggtctcgaactcctgacctcaggtgatccaaccccctcggcctcccaaagtgctgggattacaggcgcaagccactgcgcccagacttctttttctaatctttactcctccgagcaaaatctctgtgggatggggcagaggggaaggaggaaggagcgctcagagccagagaggggaggggtcggcagcaaaagtgtttttctgggtcatttgctcccaaatgggaagaccaagggagcttcctcgtgagccaagtgtccgattgcatctcaagtctctctccagaaccaagagggtcccccggggccgaggaggcatggatgatcgcatagtgggggacagagcggcccggcatttggggtcaccttgtggctgtgtggctgcagagctcccagggagcaggcttgcttgagattcgggagtccgtgggggtgggcgacatggatcccaccttgcctgggttttgagagcaaacccgtggactcagttagatctggcttccacacctcccttctctccgggcctctgtttcctgctctgtaaaatggggatattgagggccgggcgcggtggctcacgcctgtaatcccagcactttgggaggtcgaggcgagtggatcacaaggtcaggagttcgagaccagcctggccaacatggtggaaccctgtctctactaaaaatacaaaaaatgagccgaatatggtggcaagcacttgtaatcccagctactccggaggctgaggcaggagaattgcttgaacccaggaggtggaggttgcagtgagccgagattgtgccactgcactccagcctggacaacagagtgagactctgtctcaaaaaaaaaaaaaaaaaaaggggtggggggatatggagtcaccaaggcacagggctgttgagtgccggatgtaataaagcgggtaacagattctcggtcattctggggtcaagacgagctatcccggtccgaatcggagtctggtctcatcagcttcctggtttgtagaggatgaaccctggctcagagaaggacagccgcttaccccgggccgcacagccaagtagaaatgtcaggcggccaagagtcaagacgcagaggacagggagctggtggcgggggtggtgctctggaggctggccctgcccccagctgatgcctcaggctcagcatctcgagaaagtcctgccccctggcttggtgcttcctcgtggccctgagtcccggggaaagtccagggcagggagtatgggtacttgttcttcctctttagggctggccaggggccaggggagctgtgtttgctcagggtggaacctgacaccctttggaatggattgaggttagcggaagcctaggctggggggaggggtcgcccagggagcgaacgggcatttattgtgcacttactgtatgcgcgagtgtggggtcaccaggccttggagattcagcagtgagcaaggcaggccaagcttcctgctctcgtggggcgcatattttggtggggaaagacagacatgaaacaagagcgcagtaatggagccaatggctgcacagagggtaacatgcgtgagaggcgctttgtaactttattttactttttatatttttttgaaacggagtctcgctctgtcgcccaggctggagtgcggtggcgcgatctcggctcactgcaagctccgcctcccgggttcacgccatactcctgcctcagcctcccgagtagctgggactacaggcgcccgccaccacacccggctaattttttgtatttttagtacagacggggtttcaccgtggtagccaagatggtctctcctgaccttgtgatccgcccacctcagcctcccaaagtgctgggattacaggcgtgagccaccatgcccggccttattttatttttttttgagatggagtctcgctctgttgcccaggctggagtgcagtggaacgatctccgctcgctgcaacctccacctcctgggttcaaagcgattctcctgtctcagcctcccaagtagctgggattacaggcgcccaccaccacgcccagctaatttttgtatttttagtagagacagggtttcaccgtattggtcaggctggtctcgaactcctgatctcaggtgattcgctcgcctcggcctcccaaagtgctgggattacaggcgtgagccaccgcgtccggccaaaatgaagggagagctttaaatgctggcctgaagacatttggctttatgatattaaaggatattttttcccaaaatagtaaaatcattactctcatacaaatacaaaatgaggccggatgcggtggctcacgcctgtaatcccagcactttgggaggccgagacgggtggatcacgaggtcaggagttcaagaccagcctggctaacatggtgaaaccctgtctctactaaaagtacaaaaaaaaaaaaaaaggtgctttatgtgtctgcttaattcattaattaatatgggaaccggtaagactttatagcctatacagaggggaattaatttgtttcctttctttcttttttttaaaaattgaaaatagaaatggggttttgctgtgttggccggcctggtctcgagcttctgggctcaagtgatctgccagcctcagccactcaaagtgctgggatttcaagcgagagccaccgacccggcctcagcattcttgattgcctgtgtgtgtgtgttctttcagttctcctctggaccagacacggtggctcacgcctgtaatcccagcattttgggaggccaaggcaggtgggtcacttgagcccaggagtttgagaccagcctggcaaacgtggtgaaactctgtctctactaaaaatacaaaaattagccaggtgtgttggcgtgtgcctataattccagctacttgggaggctgaggcaggagaattgcttgaacctgggaggcagaggttgcagtgagccgggatcgcaccactgcactccagccccagagacagagcaagactccatctcaaaaatgtcattccgtgcccagaatgacagcaccttagcgtagatggtttccatggggcagggggccccctctagccctgggacactgtaattcacctttggctttcccactgggggcccgagtggagttagaagcatggagaggcagcccaggggatccttagtggcagatgcttaaacctttgagccttccctgaaatactgctcagggtcaaaaccgggatccccgttttacagatgaggaagctgaggcaggggctggaattcacatgggctctgcttttctctctctgctgtggaacttccttctagagctcagccgtcctcccttttgggggaaatggcatctttggcatggcttggtggctcccgcctggaatcccaacattttgggaggccgaggtgggaggatcgcatgagcccagcagttcaagacaggtccgggcaacatagcgagataccgtctctacaaaatatacaaaaatctgctgggcagggtggcgtgcacctgtggccccagctacacaggaggctggggtgggaggatcgcttgagcccaggaaagtggaggctgcagtgagctatgattgcaccactgcactccagcctaggtgacagagcaagactctgtctcaaaaaaaaaaaaaagaaaagaaaagaaagtcccctgttgaacaccctgagctgcattccatactccaagcttctagcaggttccacactcctcctacttcaaagtgccccccatgagtcctacttcaaagtgccccccatgaggtcctccagcctccccaggacgccaaaccctgagacgttcttcagccctccagtgccttagggctgagccggccacacctagaatctgcccttcctcaaaggtcgtttggatcttggcaacccacagaccggggcgtctcctcccacctggctgccctccatctctgctctctgtctctgctcctgccccgtcctctccacacggcttccttaaaacctcccagggtcccccaaaacccatgacgccagtctagtcatgagggaaacagctggtccccaatgtccccacattgagagttattctgcaaaagacctgcccagcacagactaacaggtcacagaacaggaaagacagaatcggtcacagcccagcggtgtctaaggagacgtgacagccaactaccaggtgggatcctggatggggccctggggcggcaaagggcctgcggagagacgtgaataaagtgtggagttcagtgaacaaggttgtactgatgttgacttcttggttttgacatatgtacccgtgtaataatgttaatgttagtggaaatcagttgggtgtataaaggaattctctgtgtatttacttttctgtaactttaaaattattattattatttatttatttctttttttgagacagagtctcgctctgtcgcccaggctctggagtgcagtggcacgatctcggctcactgcaacctccgcctcccaggttgaagtgattctcctgcctcagcctcccgagtagctgggactacaggcgcccgccaacatgcccagctaattttttttttttttttgtatttttagtagagacggagtttcaccgtgttggccaggatggtctccatctcttgacctcgtgatccacctgtctcggcctcccaaagtgctgggattacaggggtgaaccaccacgcccggcctattattattactattatttaatttctttgttgttgttttgagacagagtctctctctgtcacccaggctggctggagtgcagtggcgcaatcttggctcactgcaacctctgcctcccggttcaagagattctcctgcctcagcctcctgagtagcagggattacagcagcccgccgccacacccggctaatttttgtatttttagtagagacagggtttcatcatcttggcctggttggtctcaaactcctgacctcatgatcctgcctcagccccctgagtagctgggattacaggcacgtgccactacgcttggctaattttagtatttttagtagagacagggtttcaccatcttggccaggctggtctcaaactcccgacctcgtgatccacccgcgttggcctcccaaagtgctgggattacagatgtgagccaccgcgcccagcccgttcttttagtatttattgagcacgtactgcatacacagtgatggggctgcagaagaactgattgacagacacagtggaagcccacagtctttaggggagacagacaataattgaataatcgcatatgtaactaaaaagtacaattaggccaggcgcagtggcacacacctgtaatcccagcactttgggaggccaaggcgggcggatcacgaggtcagagttcgagaccatcctggccctgatccactgggggacctcagcccagcccctgctatctctgggcctcagttttcccacaagcactcagaaggggttgagctggctcatcccagggaggcctccagaactccaccttccctgggtcctcctgtccctcaccctgctcagatcacactggccctgaacgctggttcccaatcacacgtcatatacttggcttgcaacagttttgttgactgagtgactgaatgcacagaagaattaaggcacaaatgaagtagattgctgaaaagcagattttctctttttttccttttctttttgctattattatttttacttcgtgaggcaacagtagaaaaccaggttttttgtttgtttgtttggttggttggttttttttttttttgagatggagtctcgctctgtcgcccaggctggagcgcagtggcgcaatctcggctcactgcaacctccgcctcccgggttcacgccattctcctgcctcagcctcccgagtagctgggactacaggcgcccgccaccacacccagctatatttttgtatttttagtagagatggggtttcaccgtgttatccaggatggtctcgatctcctgacctcgtgatccgcccgcctcggcctcccaaagtgctgggattacaggtgtgagccaccgcgcccggccaaaagcaggtttttaattcattaaggtgatccgaaggtcaggggtggtgggaataaggggcttaaggctatgcccatctccaaagccttggatttgaacccaggtttggaggatggtactagggagccatcgagtgttcttgagcagggcatggatatgagagcagacggtgggtggttggaggaagacaatgtgtcctggtgcagttatccagcttcctctcttagaggggttgacagtgggatttctctgcgttgcccattgacatttggggccagatccttctctgggatggggccattctgggcaatgcagggtgcttagcagtatccctggcctccactcactcatgccaggagaaccttccaggtttatttttttattgtttcattttattttatttttttgagttggagtctcgctcttgtcatccaggctggagtgcaatggcgcaatctcggctcactacagcctctgcctcctgggttcaagcaactctcctgcctcggcctcccgagtagctgggattacaggcacccaccaccacactcggctaatttttgtatttttagtagagatggggtttccccatgttggccaggctggtctcgaactcctgacctcacgtgatccacccacctcagcctcccgaagtgctgggattacaggcgtgagccaccacgcccgacttgttttatttttgagatggagtcttgctccattgcccaggctggagtgcagtggcgccatctcagatcactgcgacctctgcctcccgggttcaagtgattctcctgcctcagcctcccgagtagcagggattacaggtgcctgtcactacgcccagctaatttctgtattttgagtagagacggggtttcaccctgttggccaggctgctctcgaactattgacctcaagtgatccgcccatctcagcctctcaaagtgctggaattacaggtgtgagtcaccgcgctcggcctggtattgaacaccaaaatgtctcaagacgttgccaagggtccccctctggtgagaggcactggcttggagttcgaggtgcaggggcaaacagagctgcagccaaatccctcaggccagctcaccatctggcctcagttttctcagctgcaaagtgggcgcacgagtgttgtgtgtaactggggctgcagccaagcatatgccagtaaacatggcccgggagccccattcactgctaggactttaacccacttatttctttatttatttttgagacagcgtctagctctgtcacccaggctggagtgcaagggcaagatcatggatcactgcagcctcgacctcctgggctcaaatgatcctcccacttcagcgcctagaggtgcctgctaccacacccagctcatacatatatatatatatatatatattttttttttttttttgaaacagagtctcagtctgtcgcccaggttggagacagtggcacgatctcggctcactgcaccctctgcctcccaggttcaagtgattctcctgcctcagcctcccgagtacctgggattacaggcgggtgccaacacgcccaggtgacttttttttttttttttgagacggagtttcgctcttgttgcccaggctggagtgcaatggcccgatttcggctcactgcaacctccgcctcccgggctcaagcaattctcttgcctcagcctctctagtagctgggattacaggcatgtgccaccacacccagctaattttgtatttttagtagagacgaggtttctccatgttggtcaggctggtctcgaactcccaacctcaggtgatccgcccgcctcgacctcccaaagtgctgggattacaggcacgagccaccacgcctggcccatgactgttatatttttagtacagacagagtttcaccatgttggccaggctggtctcaaactcctgacctcaagtgattcggccgccttggccatccaaagtgggattacaggcgtgagccactgtgcccagccatagcttatatatatatatatatatatataattttatttttttttgaaacatagtgttgtgctgtctgccctgtcacccaggctggagtgcagtggcgtgatctcagctcactgcaaccgccgcctcccagggtcaagtgattctcttgcctcagcctcctgagtagctgggattacaggcgcctgccaccatccttggctaatttttcgtatttttgtagagatgggttttgccctgtgggccaggctggcctccaactcctgactcaagtgatcctcctgccttggcctcccagagtgctgggatgacaggcatgagccactgcaccctgcctaagatatttttaaaaatttttgtggatgtggagatgggggtctcactgtgttgcccaggaatgagagtacagtggtgtgaccatgacttactgcagcctccaccgcctgggctcaagcaatcctcccagctcagcttcccaagtagctgggagtacaggcaagtgccaccaagactggctaattaaaaaaaaaaaaaaaggccgggcacgatggctcacgcctataatcccagcacttagggaggccgaggggggcggatcacaaggtcaggagtttgagaccatcctggctaacacggtgaaaccccatctctactaaaagtacaaaaatcagccgggcatgtgcctgtagtcccagctactcgggaggctgaggcaggagaatggcgtgaacccgggaagcagagcttgcagtgagctgagattgcgcctgggcaacagggcgagactccaactcaaaaaaaaaaaaaaaaaaaaagtgtgtgtgtgtgtgtgtgtgtgtgtgtgtgtgtgtgtgtgtgtctgtgtgtgtgtagagatggaagtctcactctgttactcaggctggtctctcctggcctcaagagatcctcccgcctcggccttccaaagtgctgggactacaagcgtgagccactgttcctggccaagcctcttattttaaagacgctgaagtcagaaagcctgtaggacaggaatgcagcattttcttttcttgcggttttttttttttggggtggtggggggcggggtggacagggcctcactctgtggcccaggctggagtgcagtggcgcaatcttggctgactgcaacctctgcctcccaggtttaagtaattctcctgcctcagcctccctagtagctgggactacagacgtgcgccaccacgcccagctaatttttgtattttcagtagagacagggtttcacaatgttggccaggctggtctcgaactcctgacctcaggtgatctgcccgaatgcaggattttctaccagctccagtcccctgcagaacccctgtccgattttgccagacctaagcagagactgctttgagcaatggcagccacgaaccttgacgtgtgcgggccggtagggaatgatgtgtttttctcacgactcattaaaacaaatacacggctatttaaagatcgctggactggccgggcgtggtggctcacgcctgtaatcccaacactttcagaggccgaggtgggtggatcacctgaggtcaggagttcgagaccagcctggccaacatggtgaaaccccgtctctactaaaaatacaaaaattagccacgcgtggtggccggcgcctgtagtcccagctactcaggaggctgaggcatgagaatggtgtgaaccccgcaggcggagcttgcagtgagccgagactgcgcccggcactccaacctgggtgacagaatgagtgtccgtcttggggggtggtggacatcgctggaccttaatcatctaaaatgattttttgcgccacctgctggtggcggagtgtcacacagggaagggctgagttgcctgtaggtatacagtaggtgttcagtaagccttagttttggttaatggtgtttctacattggctcagcatggggtcttggaaagagtttggggctccaggaacccatgctgtgcaaccttcagtgagtctggggccctttctgaaccttcatctataaaatatgtgtgtgtgtgtggctgggagtagtggctcatgcccataatcctaacattttgggtggccgaggtgggctaatcacttgaggccaggagttcgagaccagcctggccaacatggggaaaccccatctctactaaaaatacaaaaattagccaggcgtggtggcgggtgcctgtagtcccagctactcgggaggctgaggcaggagaatgacgggaacccgggaggcggagcttgcagtgagccgagatcgtgcctgcagtccagctgggcgacagagcgagactccgtctcaaaaaaaaaaaaaaaaaaaaaagaagggaagacatataaccttcatgcgatgtgagaaggtgcgttgaaatgccttctacaattcttgcttcggtcggaagtcacaaagggattgaacttcattttggctgctcccacttctgtgatggccgcaaaagggaagagaactacatgctcctttttatttattttgtatggagattgggtctcgctatattgcccagcctggtctcaaactcctggcctcaagtgatcctcccacctgactcttcaaagttctggaattacaggagtgagccattgtgcctggcctctacgccccttttaatcctcctgacaaccctgtgatgtaggggctattattttccccaattacagatgtggaaactgaggaacagagaggggcagtaagttgtctgaggtcacacagcaaataggtgagagctggttttagaactctcctagctctgaagttccaagtgggtccccacaagaggctttggcaatgctttattcgggcccttggagacccttgaggggctgactgtagctgacttgggtctctggactagtgttttgggtacaattgcagtggaggaggtgagatgtcatcttcggggaccctctaagactttgatattgttggccttgtttactaagcaaactcttaaccaaccttcaaatccccagctacgatgccccctcctccaggcagcctttcttttaccgctagagttttctctatgctcttcacccctagccacaacctgggactcctgtccctgcccagccctgactggataaggctgggaaggggtgtttatgtgtagctttgcccttttacccttttaaccttggggtggggcccaggcacagctgggcgcaggtttttttttttatagtaaggaatgtgggggtgcagccacgaccagccccgcccacccaggtgacttgaaggtttcctaccctggtccagtccctcctaggtctaaccttaggaatcccggaatcccaggcccctgagcgggaggctgggctgggctgggtgagaagaaggaaacgacctttactccctcccagagcctgaagaatttcctcctgccttgcactctgcccctttcttttccttcgttccttccttccttcccttctttccttccttccttttctttttttttttttttttttgagacagggtctcactctactctgtcgcccagactggagtgcagtggcgtgatatcagctcaccgcaacctccgcctcccgggttcaaccgattctccttcctcagcctcccgagtagctgaagcatgcgccaccacgcccggctaatttttgtacttttagtagagacagacgtttcaccatgttggtcaggctggtctcgaactgctgacctcgtgatccgctcgcctcggcctcccaaaatttggggattacaggcatgagccaccgcgcccggccctgccctgccccctttcttttctggatgctgggtgtgaagacagagcccgcaggccaagaccgcaggaaaaaggcacgcagccgctgttgtatcttcagagtccacgcctctggcctctggggcctccggttcccctctgtggaatggggcaaaccttccagagataaggtgacccagggaccagcgctatgctaaggaggtctctggccttcgacaagcttctaatccaagaggcctcccagatgcacctcaaaatgtgcccatttcgcggacggaaacaccttccaaatagtaggctccgttccaagcgcgggggttattcctgccgggtcttgctggcagccttgtcgggccgggctctggccgcggccgccggccccctctcggctgcgtggataacccggcctggagtttccgcctcaggacctggctcctgtgatgggaggtggggagagaaacctccgccgcgtccagggggcgtgtctgggcaggggcggggctgacccgagacctggaggaggaagaggggcaggtgcagccgggagctgcggagctggagggaggaggacgagagcccggccctcagcccgctgtgactctcctcagccccctcccccagcccggggtgggggccgattgactgtttccaggaccccctcgggtaggggggctggagagcccccaggtggaccatggcggtgagattccaggcgagtaaccctccaagggtggcagggggaggggctcgggctgaggtggggtggggggaaagcagggtttgggagtcggacccaggaccccagaacgcctacctacataacaggcagggaaactgagtcccagagggatgaagtggctagctggaggttgcacttcgagatgcgtccgcgcgtccgcgcccccctccctgcctccaaagaccatctcttctggagcctcctctgccccaggaccggcctcctttaataccgcagggctgggttcaaatcccgaattttctgtccactatgctgtgtgtaacgtggggccagtgagtgaaccctctccttccctcatccgaaaaatgggtgatcggcattttaaacagagagaaaaatgtgttttaagagcttggcgcatcgtaggtgggcagaaaagatgttcatccccctttgctgggggcgtgcagccggctgagcttgggcgcccgcggtggcacggtgggcagtgacttcatttgggggctggggtggctttggtgaacattcacctcctacaaggctgcacgagggagcaccagcatttattgggtgcctactgtgtacaaagctattaacaggcattaccaggcagaggcaggggtggggtgagcaagccggctggggtgcgccgtggcgggggcggggcggggggcgatccttgtctccggagggatttcaccctccaggcatggagcctgggctggtttcttcagacccaccagccagggtagactgggactgcagcggtatgcggccagacccaggccactccgccccaagcttcaggacccggcacttctggttcccgctgacttcttccttgcctccaggcacagctctcagaatcccctccccaatcggtgtatttgttcgctgaaaccgccctctctgccattgttcctggagatggggtggcggggggggggggcacaggggacggcggcccgggagccccgtacccgggggcggtgtgacttggtaccggccccgtcccctctgggcgggcctcttgttcggtgtttgtgtccagccctgggcggggggcggggacaaagacccaagccccaccctctcagagttcacctggacaggggcagggctgggaactcaggacacacctgttgagcacctggccacagtgtgttttactcaaccattcactcattcctcaaactcttccctaagggggcctggtcctatggggtcccaggggcccatccctgcccatcgggagcgctcagactgagggggaaggtgtaaggtggacaaatccactctgacatcccacaccccaatcatcacatttgggccagagggaaggatgtatgatatgcgtacggaggaagaggctggggctgtgaaggatgaataggagtttgccagggagtccagtaccagcactcaaggcctggaaaggaggctgatggccaatcacctgggccttaagtagccagagagacagacatgtctcctttcacagcctaagaggaaagaccagaaacatactaaccgatggttaaagagaataaagatgatttttagatgccttgaataaaaaataataaaacaggctgggcgtggtggctcactcctgtaatcccagcactttgggaggctgagggaggtggatcacctgaggtcagcagtttgagcccagcctggccaacatggtgaacccccacctctactaaaaatacaaaaattagccgggcgtggtggttggacgcctgtaattctagctacttgggaggctgaggcacgagaattgctggaacccaggaggcggaggttgcagtgagctgagattgtgtcactacactccagcctgggtgacagagtgacactctgtctcaaaagaaaaaaaaaaaatatatatatatatatatataaaataataaaataggcaggagtgataggggatcagagaagactggttagctaggtggtcagggaggacttcctgaggaggtggcatttgagcctagacctcagtggcaggggccagccaggcaggaatcccgtgaaacatgtcccagattcaggggacagatggggtaaaggtttggaggtgaactaagatgaggtgggctgtgaggttaggcttaatccctcaggcactgtggagctctggagggtttagacaaagcttctggtttccatggagacgaacccgcacaagctgggacaagcctggaccacctggactccctcgcccctctcccactctgggttcgggggccctggttccctggggctgtctcttttttttttttgagacggagtttccctctgtcgcccaggctggagtgcagtggcacaatcttggctcactgcaagctccgcctcccaggttcacgccattctcctgcctcagcctcctgagtagctgggactacaggcgccggccaccacgccctgctaattttttgtatttttagtagagacggggtttcaccatgttagccaggatagtctcgatctcctgaccttgtggtctgcctgcctcagcctcccaaagtgctgggattacaggcatgagccactgtgcccgggcagggctgtctcttaaagtcaggaaatacaaattccttggggccatttaaaaattttttttgagacagggtcttgctctgtcgcccaggctggagtgcagaggcacgatcacaattcactgcagcctcgacctcctgggctcaggtgatccttctgcctcagcctctcgaggagctgggaccacaggtgcatgccaccatgcccggctaatttttgtatttttttgtagagatgagggtctcactatgttgctcaggttggtcttgaactcctgggctcaagcaatcctcttgcctcggtctcccaaagtgctgagattataggcagaatccaccgtgcccggccctggggccatttaatgacacaaagtataacatcaaagcaggttaaaaaaaaaaaagatgcagttttgaaaaataagctcagaagaaaaagagtaaataatcagaaagccactgtagcctggtggttaagagcaagagtgaggctgggtgcggtggctcacgcctgtaattccaacactttaggaggctgaggtgggaggatcgcttgggcccaggaatttgagaccagcttggtcaacatagcaaaaccccatctctacaaaaaaacaaaaaaatatgctgtgtgtggtggtgcatgcctgtggtcccagctacctgggaggctgaagcaggaggatcccttgggcctgggagttcaaggctgcagtgagctgtgattgagccactgcactccagcctgggcaacagagtgaaaccccgtctcaaaaaccaaacaaccaatcaaccaaccaaccaaccaaaaaagagccagagaacagggcaggctgccaagttcaccactgtgctgcgtgacctcaggcaagttactgaacctctctaggccccttttaatctcacctctaaagtaggaataataactgtgccacttcctaaggtcactctgaggatgaaatgaatgggtccacatcaagcgcctgcttgcagccaggttcaagacagcctgaccaacatggtgaaaccccgtctctactaaaaatacaaaaagtagctggctgtggttgtgggtgcctataatcccagctactcgggaggctgagtcaggagaataacttgaacccaggaggtggaggttgcagtgagccgagactacgccattgcactccagcctgggcaacaagagcaaaaaaccccatctcaaaaaaaaaaaaaaaaactacacaaggagaaagtcattatttggccaccacctccccaaggctccttctgctttttgcttttcaggcattgaatctgtacccttttcccaaaccacatccctgcaagacagggcagcagtgccatttcacagatggggagactgaggctgggagaggccccgccatagctagcacgggtgggcagacttgggatttgagtccagtcctgagcgctgccctggctccttcagaactgcagagccctgccctctgctctgtttctctcccctccacccgccttcccactcctggagatcaggaatgctggcctcgctagagacgctggagcttataagaaaaggcactggagcgcaccaatggggggtgcctgggcagagggaatcacacacccgctgtgccaagcctagaaaacccgccccggggaggaggaggagtcacttctacaaactccctccccactccctccacctgtcccctgcctggggagcagggcatggtgcgtgctggcaggagggaagggagggtggaggcgtggccaggtgaccttgcacctgagtctggtgttctcattcatgccatggacatgaaaataacagaatctgcctggtgtggaggctcacgcctgtaatcccagcactttgggaggccaaggcgggcggatcacttgaagtcaggagttcaagatcagcctggccaacatggtgagacccccgtctctattaaaaatacaaaaattagctgggcatggtggtagacacctgtgatcccagctacttgggaggctgaggcaggagaatcgcttgaaactaggaggcagaggttgcagtgagccaagttggcaccattgcactccagcctcagcaacagagttttttttgttttttttttttctaagtgggaaagcccaggtgggaggatcatttgagcccaggagttcaagaagagtctgggcaacacagcaagaccctcctgtctctataaaaatagaagttaaaaaattagctgggcatgatggtatgcacctatagtcccagttactcaggaggctggggcaggaggattgcttgaagccaggagttcgaggctgcagtgagccataatggctcacacttgtaatcccagcactttgggaggccaaggctggagaatcacttgagcctaggagtttgagaccagccttggcaacacagagagactccatctctacaaacaataaaaaaaattagccgggcatcgtgatgtgtgcctgtggtcccagttacttgggaggcagaggtgggaggatcacttgagcctgggagttcgaggctgcattgaaccgtgatcacaccactgcactccagcctgagtgacagagaccctgtctaaaaaaaaaaaagtgtgggaggggggacttcatggctctgtgcctcagtttcctcatctgtaacatggggataattgaatgcacctttgatgaatgtattaaatgagatagtacatgtaaggctgggcgcggtggctcatgcctgtaatcccagcactttggaaggccaagggggtggatcacaagatcaggagttcgagaccagcctggccaacatagtgaaaccccgtctctactaaaaattcaaaaaaattagctgggcatggtggcacatgcctgtagtcccagatacttgggatgctgaggcaggagaatcacttgaacctggaaggcggaggttgcagtgagccaagatcacgccattgcactccagcctgggcaacaagagcgaaactctgtctcaaaaaaaaaaaaaaaaaaagagatagtacatgtaaagcacctggcacaaaggaagtgtttcattcattcactcattaattcattcagcaaatccttcttgaatccctgctgcaactcaggcgctgttctaggcagggaactgagggctcagttttggacaaagacaaaaatctctgccctctgtgggtggatcagttgaggtcaggagtttgagaccagcctggccaacatggtgaaatcccgtctctactaaaaatagaaaaattagcctggcgtggtggtgggcacctgtaggtgcccagctactcaggagcccagctactcaggaggccagtaggcagccagctactcaggaggctgaggcaggagaatcacttgaacttgggaggcagagactgcagtgagcagagattgtgccactgcactccagcctgggcaacagaatgagactccgcctcaaaaaaaacaaaacaaggctgggcacagtgactcacccctgtaatcccagcactttgggaggccgaggtgggtggatcacttgaggccagaagttaaaggccagtctggccaatgtggtgaaaccctatctctattaaaaatataaagattagccaggtgtggtggtgcacccctgtaatcccagctacctgggaggctgaggcaggagaatcgcttgaacccgggaggtggaggttgcagtgagctgagatcgtgccactgcactccagcctgggcgacagagccagactctgtctcaaaaaatgaaacaaaacaaaaaaacaaacaaaaaaacctgaggccctgagagaggtagtaacttgtcacaggctccaaacacaggcctgtcagagctggactccccaccctgagctggggacccccaagtgctcagatgaacctgtgtggcctcatgcccatcttccccgctcccctcgaccaggtggctgacatggaggagctgaccatctgggaacagcacacggccacactgtccaaggtgaggcctccctctccctgtctgggtgccagagagtatggcggcttaggcccagctcaatagaggggagaccctttaccctgggggaaacagcagctcttccttcccctcatcctctctcaggacccccgccggggctttggcattgcgatctctggaggccgagaccggcccggtggatccatggttgtatctgacgtggtacctggagggccggcggagggcaggctacagtgagtatccaggcagctgggttctggcgggggagggcacgtggagaggagaaaccaggccaggcacagtgactcacacccgtcatcccagcactttgcgaggctgaagtgggcggatcacctgagttcaggagtttgagaccagcctggccaacatggtgaaaccccgtctctactaaaattacaaaaattagcgggatgtggtagcgtgttcctgtaatcccagctactcgggaggctgaggcaggagacttgcttgaacccgggaggcagaggttgcggtgagccaagattgcgccactgcactccagcctgggtgacagagtgagactctgtctcaaaaagaaagtaagtgaggtgaggagaaacctttgtgagcctggcactttccagctctgtcaacacagggctcggacttggcagtaggacagtgtcagagacttgggcctcacttccctaaggtacttcctggtccttcacaggaattcttggggtcatagtggccccagagcccttttggaacataaagtcctggaaaccatcgagtgtttgagggtttgatgcttcttggaattatgttgttaaaatggttctgggccccaagtggctgacaggtgatatggctcagcccagcccagaattagggaccaccaggttcagagagaaagagctagaaagaaaatatgaaatacagacaggaagagagggaaagaaaagcagaaagtggggatttgtggtgtggggagcgaggagtgagaagatgccaggtgtagctgtagcttcaaggccgggtgcagtggctcacacctgcaatcccagcactttgggaggccgaggtgggcggattacctgaggtcaggagttcaaaaccagcctggccaacatggtgaaaccccatctctactaacaaatacaaaaattagacgggtgtggtggcgggcacctgtagtcccagctactagggaggctgaggcagaaggatcgtttgaaacgaggaggtggaggttgcagtgagttgagatcatgctactgcaatccagcctgggcaacagagtgagactctgtctcaaaaaaaaaaaaaaaaatgtagcttccactctatgattatagtaggttctacaattggctccattttacaggtgagaaaacggaggcccagaaggataaatgtctttgtgaacctagggacaccaatgaattagaaccaggccttgtagatctggaggttccaggggcaccccctccccagggagggcttgttacgagggtctcccctgcaaagcctcctccgtaagacccgccctcctctctcaggacaggcgaccacatcgtcatggtgaacggggtttccatggagaatgccacctccgcgtttgccattcagatactcaagacctgcaccaagatggccaacatcgtgagtaggcagcccctggcatggccagcatctctgaccccagcctgggtcgtgccgctgtgggggttgtaagcttctgagagcaaggagtcatcttctcatcttacagtttggacattgaggcccagagagagactggtgtcccccagggccacccgggggctgagcagagcctcccccagcccttgcctgtagctgacccttcctgtcccctcctctaacagacagtgaaacgtccccggaggatccacctgcccgccaccaaagccagcccctccagcccagggcgccaggactcggatgaagacgatgggccccagcgggtggaggaggtggaccagggccggggctatgacggcgactcatccagtggctccggccgctcctgggacgagcgctcccgccggccgaggcctggtcgccggggccgggccggcagccatgggcgtaggagcccaggtggtggctctgaggccaacgggctggccctggtgtccggctttaagcggctgccacggcaggacgtgcagatgaagcctgtgaagtcagtgctggtgaagaggagagacagcgaaggtcagaagaggcgggaggtcggacacgatcagtactggacacagggcaccgtggtcggatgggcgacggtttcaagtgattctcctgcctcagcctccctggtggctgggactccaggcgcccgccaccatgcctggctaatttttgtacttttggtagagatggggcttcaccatgttggcaaggatggtttcgaattcttgacctcaggtgattcacccacctcggcctcccatagtgcttgctgggattgtgggcgtgagccaccgcgcccagcctggaagctacaactacacctggcatcttcttgctcctcgctccccccaccacaaatccccactttctgcttttctgtccctttctgcctgtctgtatttcatatattctctctagctctttctctctgaacctggtggtccctaattctgggctaggttgagccatatcacctgtcagccacttggggcccagaaccattttatcaacatgtccccgcgctgatccccgggacctctgtttaggccacctcacttagcaagagggactcagcagatgggatggagtgaaggaccctgagctcagaggtgatcctggatgatctggggggcccagtgtcaccacagggtccttataagaggaggcctggctgagtgtggtggctgatgcctgtaatcccagcactttgggaggccaaggcaggcagatcacttgaggccagtagttctagaccagcctgaccactatgatgaaaccccatctctactagaaatacaaaaattagccaggcgtggtggtgtgcacctgtaatcccagctacctgggaggctgaggcacgagaattgcttaaacccgggaggtagaggttgcagtgacctgagattttgccactgcactccagccccggcgataggagtgagactccttctcgaaaaaaattaaaaaataaaaaataaaaattgaaacaatgatgatgttatgagcaatagaatgcccttagcctgtgcatggcaacatcacgagtggcacggtgacctggtgtccccgccccgtggagatgtcattgacacaatcagatctcgggtcctacgggcgacatcactgttctccttatgatgccatcaaggtgttaggatgggagggcccgcacctggactgcttacagcaggagaatgctcccaggcacccgtctccagagtcctgcctcagtttccctcctccccccttacagagtttggcgtcaagctgggcagtcagatcttcatcaagcacattacagattcgggcctggctgcccggcaccgtgggctgcaggaaggagatctcattctacaggtgaggccgggcttcttgtcctgagagcagggagacaaggcagggttggggcgggcagtcccacggagtcatacagcaaggacagcagaactgggccccaaagcatttaccttcagtgttgttgcttgtatctcaaaggttgcagatggccaggcataaaaccccctttttccccagctactactaatccacagccaaatgtcggtttctagtatccccatggggttgtctgtttctaataccctctagctttgatgtgcatcagagactcatgtgggcagctgactcctggacctaccctaggtgactggatgctaatgacccagtcaccaggtttaggggagctgccctgccctaaaggatggtatctttctggattcttcccctgaaagtctgtttctagtgactcctagtgtttgatttccaaattgctttcagctgattatttccagtgtcttcaaaaagttatctgtttctttttttttttttcagacagagtctcgctctgtcacccaggctggagtgcagtggcgcaatctcggctcactgcaacctccgcctcccaggttcaggtgattctcctgccttagcctcccgagtagctgggattacaggtgcccgccaccacacccagctaatgtttgtatttttagaaaagacgggtttctccatgttggccaggctggtctcgaactcctgacctcaggtgatcccccccgctcggcctcccaacgtgctgggattacaggcgtgcaccaccacaccttgctaattttttgtatttttagtagagacggggtttctccatcttggtcaggctggtctcgaactcccgacctcaggtgatccatccgcctcggcctcccaaagtgctgggattacaggcatgagccaccacacccggccgacattaagttctttctaggaattgtgtgtttctaatctacctctagatgactgttttcttttctcttttcttttctcttctcttttttcttttcttttctttctttttgatatggagtgtcgctctgtcacccaggctggagtgcagtggcgggatcttggctcactgcaacctccacctcccgggttcaagtgattctcctgtctcagtctcctgagtagctgggaccacaggcgcccaccaccacgccctgctaatttttgtatttttagtagagacagggtttcaccatgatggccaggctggtcttgaactcctgacctcaactgatctgtctgcctctgcctcccaaagtgctggcattacaggcgtgagccaccgcgccccactctagatatctgtttctagttatctcccagaagattgtgtgtttctagtatcttttaagtatctgatactccctcttctccagttagagttgtttataatgtcaccctcacatctgttcctagtatcccctgagacatttccacttttggtaagaaaggagagtcaacctgtttctcattttccccagtgtctcccacccctcttagaacattttctgtttctagaattcggtgctcagttcttggtgtggtctccactcacagcaggaatccaattcaacactttccttagggagtggctgtttttagcaacctctgggggaattgtctgtttcaagttcccccacaccaggctgtttctactgtctcccatctctcattaactcacttccgctctttcattcctggtccctttcagatcaacggggtgtctagccagaacctgtcactgaacgacacccggcgactgattgagaagtcagaagggaagctaagcctgctggtgctgagagatcgtgggcagttcctggtgaacattccgcctgctgtcagtgacagcgacagctcgccattggagggtgaggacctagaggttaggacctgggagggggttgaatggatggcagggaaggtgggaagccccaggcagggccaaggaatcaatgagcctggtccctagaggctcagagagtgacaggaacttgctgaaggccacacagcaagtcaagagttcaggggggcgatctcggctcactgggttcaagcgattctctgcctcctgggttcgagcgattctcgtgccttggcctcctgagtagctgggattataggcgtgagccaccgtgcccagctccagagccgaatcttctaactgagcttctgactttggtctagggccctttgtttagaggggtgttgatatacccctctgtaaaatgggtccagtccagaaggcgtgaccatggctgatgagatgtcctctccccctgcagacatctcggacctcgcctcggagctatcgcaggcaccaccatcccacatcccaccaccaccccggcatgctcagcggagccccgaggccagccagaccgactctcccgtgtaagtatcacccatcggccagaatggtgatagggagggagagggaggtgggagggagaggggaacgcgggcgtagctttccaactgggggtaaccttgaggacgcagtcctgtatttctagcatgtgcctcaaaatacctccagcctctacccattacccagttccaaagccgtgtccgcatttgtaggtgttggttacagcagcaccccacttcttagtatcaaactctgccttaggccaggtgcggtggctcacgcctgtaatctcagcactttgggaggccgaggagggtggatcatctgaggttaggagttcgagaacagcctggccaacgtggtgaaaccctgtctctactaagataccaaaattagcccggcgtggtgccgggtgcctgtaagctcagctacttgggaggctgaggcaggagaatcacttgaacccaggaaatggaggttgcagtgagccgagatcgtgtcattacactgcagcctaggcaaccagagcaaaactctgtcttaaaaaaaaaaatttctttttcctctatttatttatttgttttgagactgagtcatgtgagactggctaattttcatatttttggtagagatggggtctgtattgcccagctatgttgcccaggctggtcttgaactcctgggctcaagcatttggcctgcctcagcctcccaaagtgctggtattacaggcgtgagccaccacgcccagcccagataaattaaaattatttttattttgtttatttatttatttatttttttggagacaaggtctcactctgtcgcccaggctggagtgcagtggcatgatcttggctcactgcaacctctgcctcccgggttcaagcaattctcctgccttagcctcctgagtagctgggattacaggcgcccaccatcatgcccggctaatttttgtatttttggagagacggggtttaacctcgttggccaggctggtcttgaaatcctgacctcaggtgatctgcccacctcgacctcccaaaatgctaggattacaggcatgaaccaccgtgcccggcctaaaattctttttaaaatggccccttgaaatccatccctgcctcactcccaatctgttccccaccagggagagtccccggcttcggcgggaaagttcagtagattccagaaccatctcggaaccagatgagcaacggtcaggtgggtggtgactctgagcacccctgtccctgacatttctgatccctgacagcaaggctgtgccaggcagagctgggggaggttggcctgagcctaagtggtgagacatggtttcctgagaaggactcgaggtgggtgacagtccttccaggatgaggacataaagcaaaggtttggaggctggactgagccagtgtgcttgggaaagagactggcttttccctttcagagttgcccagggaaagcagctatgacatctacagagtgcccagcagtcagagcatggaggatcgtgggtatgtaccccagaagaaagcaaacccgctcaaaactcctacatcccaggctgcctccctcatcagcgcaatcctgcctgcttgtatccattgtgttgagtgggaccattaagtgggggttttggggaaactgaggcctggagggggtgggggctttcccaaggacaatgctgagccctccctttgtccgcccactctgctctgaccccatctctgcctccccttgcaggtacagccccgacacgcgtgtggtccgcttcctcaagggcaagagcatcgggctgcggctggcagggggcaatgacgtgggcatcttcgtgtccggggtgcaggcgggcagcccggccgacgggcagggcatccaggagggagatcagattctgcaggtgctccgggggcggctggccagccccactgatcatgggcgtgcagtgtgctaggtcctgcccttgtctgttccagtcctccccttgggtccacctggggactgtcgagaccccagatgggtatttgaacatttcagtgtctccttggctgtgtcatgattttgctgatgtcacgaccttatcttccaggtcatgacctcatcgtccagttacaacctccttttctgtgccttgaccttatctgggttcattttttgttgttgttgtttttgagatggagttttggtcttgttgcccaggctggagtgcaatggtgtgatcttggctcaccgcaacctctgcctcccaggttcaagcaattcttctgcctcacctcctgagtagctgggattacagttgtccaccaccacgcccggctaatttttatatttttagtagagatgagggtttcgccatgttggccaggctggtctcaaactcctgacctcaggtgatccacctgcctcggcttcccaagtagctgagattacaggcatgagccactgcgcctggctaactttttttttttttttttttgagatagagtcttgctctgtcacccaggctggagtgcgggggtgtgatcttggctcactgcaacctccgcctcccgggttcaagggatcatcctgactcagcctcccaagtagctgggatcacaggtggccgccaccatgcccagctaatttttgtgtttttagtagagacagggtttcaccatgttggccaggctggtcttgaactcctggcctcaagtgatgcacccgcctcagcctcccaaagtgctgagattataagcttgagacactgtgctcaagattgggaacaacaatcttgttgttcatgtcatatgacattgttcatgtgacattcttgttatcaatgtcacaatctccttgttatcaatgtcaggactttgggtcacagcctcattgcctatgtcatgaccttgtctgggtcgcaatcctcttgttcctgacattggctgtgttgaccgtgtcatgaccgtcttgtatgtcctaatcgtgtggtcaggtcacagatcattctctcatgatctccatgtccacttatagtcattttctgtgccaccatcccctgtgtctgtgttgtgaccttgcctgtgtcctgccttcatgacagtgtcataactacctccaggatccacagcccctcatcatccccccatctctgtccttgcctcatctcatccccaggctgtctcccctgtcccttgcgcgagttcactcaccaagtctcacccccactttgctctcatgaccttgcttgtgtcttgaccttgcagtgtgagttgtgattcatgatggagtcacagctccccactttccatgtcataagcccactggctgggtgaaaacttgatgccaaattgcctgagggtcatggtattttttactgtatttctactcattttgcttgtgggattctaaccttgacatccacgtcatgaccccgagagtaggtgtctgtgcccacaagctgtgcaagtatattgctgtccctgttatgaccctgagagcaggtggctgtgtctgtatattgctgtccatgtcgtgaccctgagagcaggtggctgtatattgctgtccatgtcatgacccggagagcaggtggctgtatattgctgtccatgtcatgaccctgagagcaggtggctgtgtctgtatattgctgtccatgtcatgacccggagagcagatggctgtgtccatatattgttgtccctgtcatgaccctggtggtaggcatctgtgacccactgtgtgtccatatatcgttgtccctgtcacgaccctgtgactactgtgactacgtctgagttcttttgagcatttcacacagtttccatcgagctccatgccatgacctctgttcccatgttttgatattgacaacccaccatgatttggttatctgaggacaagtgcagtgcctgtgcccgtttctgtgtcaaaactcttgtatccttacaatgccaccagctgtctgtgtcacacatcacacagccatagggtgataccccagtcggaaagccctcggggaactgccgggtcccttggcagcagctctggaagcagctggggctgagttttgcccagaggaaggtccaggatctcatgcacgcccaagaggtaccagagctttttctatagctgcacttgctttctggcaggtgaatgacgtgccattccagaacctgacacgggaggaggcagtgcagttcctgctggggctgccaccaggcgaggagatggagctggtgacgcagaggaagcaggacagtgagtgcgcgtggatatgggtgtgcctgtgtgttgcggggggaggacctggctgtgtggcctggtggtgagtgcagggatgtggttgaatctgcatctctgcaccctccatccctctccctggcccctacagggagagtgccccaaatctccagccaggcccactctcgggtggggagggctcagatcaggcagcagcccaggcagctcatgtggcctcccgctctccccagttttctggaaaatggtgcagtcccgcgtgggtgactccttctacatccgcactcactttgagctggagcccagtccaccgtctggcctgggcttcacccgtggcgacgtcttccacgtgctggacacgctgcaccccggccccgggcagagccacgcacgaggaggccactggctggcggtgcgcatgggtcgtgacctgcgggagcaagagcggggcatcattcccaaccagagcaggtggggactgtgtgctcctgcagtggggcacttctgcttcagcctcagtctccccgttagaaatgggctcgattgggctggacgcggtggctcaggcctgtaatcctggcactttgggaggctgaagtgggcagatcatgaggtcaagagatcgagaccatcctgggcaacatggtgaaacctcgtctctactaaaaatacaaaaattagctgggcgtggtggcacatgcctataatcccagcttcttgggaggctgaggcaggagaatcgcttgaacctgggaggcagaggttacagtgagccgagatcacgccactgcactccagcctggcaacagagtgagactcttgtctcaataaataaataaataggcatgatatcactgcttagcagtgttggtggttcaatctgaggaggtccacaaaaggctctgggcgggccccatttggtgctggtatgagcttcctgttgttgctgtaacagatgcccagaaacttagtggctttaaacaacacacacatcctcttacagttctggagagcaaaagtactaaagtcaaggtatgggcaggcctgggccctcccagaggctccaggagaaaaccaattttccacctttcccagagtctagaggggccgcatccctcagctcggggccccttcctcccccttcatagccacagcacagcctcttctagtctctctctgactctcaccctcccgcctcttcttgtgaggaccctgtgaggacatcgggtcccctgggtcacccaggatcatcatccacctcaatagcatcagtttaatcccatctgcaggccaggcacggtggctcacgcctgtaatcccagcactttgggaggctgaggcgggcagatcacgaggtcaagagattgagactatcctggccaacatggtgaaaccccatccctactaaaaatacaaaaattagctgggcgtggtggtgcatacctgtaatcccagctacttgggaggctgaggcatgagaatcgcttgaacctgggaggcggaggttgcagtgagcagagattgcaccgctgcactccaacctggcgacggagcgagactctatctcaaaaaagtaaataaataaataataaagattagctgggcgtggtggcgggcacctgtaatcccagctatttgggaaagtgaggcaggagaatcgcctgaacccaggaggcagaggttgtaacgagtccagcctgagtgacagagcaagactttgtctcaaaaaacccaaaataataataatagtaataataatcccatctgcagagtcccttttgccatacaaagtggcctgtccacaggctccgaggggtaggacgaggacgtctttggggccaccatgctgctgaccccagtgctcagtactgtcccctcttctccccagggcggagcagctggccagcctggaagctgcccagagggccgtgggagtcgggcccggctcctccgcgggctccaatgctcgggccgagttctggcggctgcggggtcttcgtcgaggagccaagaagaccactcagcggagccgtgaggacctctcagctctgacccgacagggccgctacccgccctacgaacgagtggtgttgcgagaaggtggggcccggagctggaggggccctggggaggcctcacacacagctcctggtgcacctgttcactaacattcagcctctaaaaggcacagtcttggcccggcgtggtggctcacgcctataatcccaacactttgggaggccgaggtaggaggatcgctgaggccaggagttccagatcaacctgggcggtaaagcaagactacatctctacctcaaatttatttatttatttatttttgtttttatttttatttttagacagagtcttgctctgtcttaggctggagtgcaatagcgtgatctgagctcactgcaacccctgcctccctgattcaagcgattctcttgcctcagcctcccaagtaaccgggattacaggcgcccatcaccccgcccccagctaatttttgtatttttagtaaagacggggtttcaccatgttggccaggctggtcttgaactcgtgacctcacgatccacccgcttcagcctcccaaaatgctgagattacaggcgtgagccaccacgcccggcctctacatcaaatttaaaaagatagctgggcatggtggtgcatacctatagtccccgctgcttgggaagctgaggcaggaagattgcttgagcttgggaggtcgaggttgcagtgagctatgatcgcaccagcctggcccacatggtgaaatcccatctctactaaaagtacaaaaaattagctgggcatggtggcaggcgcctgtaatcccagctacttgggaggctgaggcaggagaatcacttgaacccgggaggcagaggttgcagtgagctatgatcgcaccactgcactccaccctgggccacagattgacactgtcttcaaaagaaaaaaaaaaaaaagcatgtttctaaccactctccttctatcaaaaatacttttgggcctgggtgcggtggctcacgcccgtaatctcaatggtttgggaggctgaggcaggtggatcacctgaggtcaggagctctagaccagcctggcccacatggtgaaatcccatctctactaaaagtacaaaaaattagctgggcatggtggcaggtgcctataatcccagctacttgggaggctgaggcaggagaatcacttgaacccgggaggcagaggttgcagtgagcggagatcacaccactgcactccagcctgggcaacaagagcaaaactccgtctcaaaaaaaacaaaaaaacaaaaaaattttgggttattttaggggacagaaggacaggaagggggttcattccttaaaaatctatttgtgtctccaacagaaatatggtgcaaggcatgtagatagccttacaaaaggaaaaagaaatagcaataataataattttaataatttatcttctttgaccgggcgtggtggctcacgcttgtaatcccagcactttgggaggccaagatgggtgggtcacttgagcccaggagtctgggaccagcctggacagcaaagtgagactctgtctctacaaaataaaaaataaattagccaggtgtggtggtacgccagtagtcccagctacttggcaggctgaggtgggaggatcccttgagcccaggaggtcgaggctgcggagagctatgatcatgctgctgcactctagcctgggcaacaaagccagactctggggggaaaaatgcctcatcctgatttcaggaagggaagagattaagctcttatcagaggacagggggttaaaaacccaggtgcagcgattttccaaataaaaccacaaaaggggtgggaagagcaaattgcccgggacaggggtgggtggatggaccttgagaaaagcctttgacactgtcatcgcgctgctccaacatccagatgaaaacgtcctagaaatacaaggccacggccaggcgtggtggctcacgcctgtaatcccagcactttgggaggccgaggtgtaatcccagcactttgggaggtgggtggatcacctgagttcgggagttcgagaccagcctggccaacgtggtgaaaccccgtctctactgaaaatacaaaaattagccgggcgtggtggtgggcgcctctaatcccagctactcaggaagctgaggcaggagaatcacttggacctgggagatggaggttgcagtgagccaagattaagccactgcaccgccagcctcggtgacacagcaagactctgtctcaaaaaaataagtaaataggccacgtgcggtggctcacgcctgtaatcccagcactttgggaggccgaggcgggcggatcacgaggtcaggagttcgagatcagcttgaccaacatggtgaaacccagtttctactaaaaatacaaaaattagccaggcatggtggcgcacgcctgtaatcccagctactcaggaggctaaggcaggagaactgcatgaacctggaaggtgaaggttgcagtgagccaagattgcgccactgcactccagcctgggccacagagctagactccatctcaaaaaaaaaagtaaataaaataaaagaaagaaagggagaaagagaaggattaagttgcaaagaccctgggctaccacttttctcccctcaagacgcttctgtgactgtttcttcagtggtaaaatggtgtatctggtaggccaggtgtcaacatacttttcctgcaaaggatcacatagtaactattttaggctttgtgggctagtctctggcagaactactcagctctgctcaaaggtagccatagacaggacataaagaaatggttgtgactgtgttttgataaaactttattgacgaacacatgcagtgggccagatgtggccctcaggttgtagtctgctgacctatgagttagctaggttcaactgctaaaaagagaccctacagccaggaagaaagggaatgaaggcaggagaggggcttattcctgcccttgaaggcggaacccagaaatgtacacatcaattctgctagtgttccattggccattatttggtcataaggctaacctagctgcaaaggacactgggagatgtagtatttggctgggtagctatggtcctggttaaataggctgtttactataaggaagtggaggggtttgtacaacacactagcagtctttgatcgcaaatgggaccctgattctttcactgtgtctctacccctcagccagtttcaagcgcccggtagtgatcctgggacccgtggccgacattgctatgcagaagttgactgctgagatgcctgaccagtttgaaatcgcaggtgagaagccagatcctctggaaacctcgttggtgaaatagtttcacaactgtttttttgtggggggtcgggggagagttagaataatgatggcaaacatgaagcagatgggccaccagtgccccccccaatacccaagccagacatcctcaatccatcttggcaccgtttgtctggatagaacctccaaatccttcttaacacagttcaccaggtagccattgccaattgaggcaaagtgccacctgttatttgtttaagagaaatttattgatcttctgagacagcagtgaacacgacaggcaaggtcccttggagaagactccaaattaacaactgtagaaacaatggccgggtgcggtggctcatgcctgtaatcccagcactttgggagtccgaggcgggtggatcacgaggtcaagagattgagaccatcctggctaacatggtgaaaccccgtctctactaaaaatacaaaaattagctaggtgtggtggcgcgtacctgtagtcccagctactcgggaggctgaggcaggagaattgcttgaacccgtgaggcagaggttgcagtgagccgaggtcatgccactgcactccagcctgacgacggaatgagactctgtcaaaaaaaaaaaaaacaaaaacaattaagatagactaggaggccgggcgcagtggtcaggagttcgagaccagcctggccaacatggtgaaaccacatctctactaaaaacacaaaaaattagctggacatggtggcgcatgcctgtaatcccagctactcaggaagctgaggcaggagaattgcttgatcccaggaggcggagggtgcagtgagcagagatcacgccactgcgctccagcctgggtgacagagggagaccctgtctcgaaataaaaaacaaaaaatagttaagattgcaaattttggctgggtgtggtggctcacatgtaaaatctcagcactttgagaggccaaggtgtgaggatgacttgagcctaggagtttgagaccagcctgggcaacacagcaaaatcacgtttctataaaagaaaaaagaatttttttaattaaaaaaagatgcaaattttatgtcttttttttttttttttttttttttttttttgcatcagagtcttgctctgttgcccaggctggagtacagtggcaggatctcgactcaccgcaacctctgcctcccaggttcaagtgatcctcctgccttagccaccctggtagctgggattacaggcacgcgccaccatgcccggctaatttttgtatttttagtggagacaggtttcgccgtttggccaggctggtctcaaacttctgacctcaggtgatctacctgcctcagcctcccaaagtgctgggactacaggcatgagccactgtgcccggccaattttacgtttttaaccacaaaaacaaaaaggggggatgagatcacgtctccctccttgaacccctccatgccaggctatgtctccttcctgaaactttgcacgatccaggagggcttcctggaggaagcagtgctcctctcaggtcctagaagacagataggggcaagagtggagtttcctgtggggtcgtagcctgagcagagccctggagttggaactgagtctgggagagccaggggctgcagctcaggctcagcatcaggcctctgaccctgcaaccctgagcaagtggcctgttgtctctgagcctcagtttccccacctgccacataggccagtaccagccacccactcctcaggaggaggagggggctgaggtcaggaggggatgtgagtgcagtgcctggcacttggccaacatgagtttctgctgctgttaggatttctctccagggcaatggggagccatggtggcttcttgagcaggggaggggcaggtaggcatgaatttgaggggacgggggctgccctcctgaagctgctggtcctctctgccgtccacagagactgtgtccaggaccgacagcccctccaagatcatcaaactagacaccgtgcgggtgattgcagaaaaagtaagccgggtcctgctacgggtcccatttcatggatgggggaaaccgaggcctgggcatccaactgaatgtcctgacctgttctcagcccacaccccacaagtgcagtcttccatagagccccttttggaggctttgtgaggcaggaggcccgagacagacaagggcttctcggagtcaaacagcagccagccctgggcaaaggcagagagactcaagttgaggttttgatgcccaagatgctgcgacctgggctgttaccacccccatccccaacttgctagcctgtggatgtgagaggctggggtccactctgacctcagactcttcatctttctatctttctctctctgtttaccctgctgcaatccccctcaccccaacgtccgccggcctggcccaggacaagcatgcgctcctggatgtgaccccctccgccatcgagcgcctcaactatgtgcagtactaccccattgtggtcttcttcatccccgagagccggccggccctcaaggcactgcgccagtggctggcgcctgcctcccgccgcagcacccgtcgcctctacgcacaagcccagaagctgcgaaaacacagcagccacctcttcacaggttggggggtgggtgtcccagggtaggcgggtgggccccagcctgagtctcctgcacacactgacgtcccctccctgcagccaccatccctctgaatggcacgagtgacacctggtaccaggagctcaaggccatcattcgagagcagcagacgcggcccatctggacggcggaagatcaggtactgccgcggtgtgggtgggtcgggcagggaggccccacagacgctgtgcaggcccagctggggtttggggcctctgtcgggagttagggcttggtcagggatcaggactgtggccagagtcaagatgggacctgagacaagggtgttggactggaacttgggtgagatgagattggaggagctgttttttgttgtttgatttgagatggagtctcatgtcacccaggctggagtacagtggtgtgatctcagcttgctgcaacctccgcctcccgggttcaagtgattctcctgcctcagcctcccgagtagctgggactacaggcgagcgctaccaggcccagctaatttttgtatttttagcagagacgaggtttcaccatgttggccaggctgggctcaaactcctgacctcaggcgatccacctgcctcagcttcccaaagtgctgggattacaggcctgagccaccgcgcccagcctggaggagctgttttgagaatggagtcagtggggcacgggagctcacgcccatggtcccagctactcaggaggctgaggcaggagaatcacttgaacccgggaggcagaggttgcagtgagcagagattgcgccacagcactccagcctggcaacagagactccttctcataaaaaagagagagagaatggagtcttctcttggggctggagtcaaggtttggggctcagcttggatttgggggctgagcctctcaggtgaagggtcaatggatacaacccatcctggagtcaacagagaagcctccactgaggctccaggctccaggctcctcgccttgatttgggaccagagtttgaaggtggggggatgtcgtgggtggcagctggggtcctggccagggccagccgcagcatccacacccaccccacagctggatggctccttggaggacaacctagacctccctcaccacggcctggccgacagctccgctgacctcagctgcgacagccgcgttaacagcgactacgagacggacggcgagggcggcgcgtacacggatggcgagggctacacagacggcgagggggggccctacacggatgtggatgatgagcccccggctccagccctggcccggtcctcggagcccgtgcaggcagatgagtcccagagcccgagggatcgtgggagaatctcggctcatcagggggcccaggtgcgtcggacatggggggcaggcctgggaagggtctccggaggggatgccagcacagagcagacacacactgggagcctgttttctaccaggacgtcaacaaacacggcttccctggtcagactggtttctgggactcagacctggggtagctgagacccacgtggcactgagtaacttgcagcattttttttttttttttttttttgagacgcagtcttgctctgtcgcctaggctggagtgcaatggcgcaatcttggctcactgcaacctccacctcccaggttcaagcgattctcctgcctcagcctcctgagtagttgggattacaggcacctgccaccatgcccggctaatttttgtatttttagtagagacggggtttcaccattggtcaggctggtcttgaactcctgaccttgtaatccacccgccttggcctcccaaagtgctgggattacaggcatgagccactgcacccaggcttttttttttttttttttgagatggagtttcgcttttgttgcccaggctggagtgcgatggcgtgatctcggctcaccacaacctccgcctcccaggttcaaacgattctcctgtctcagcctcctgagtagctaggattacaggcgtgcaccaccatgcctggctgattttgtatttttagtacagacagggtttctccatgttggtcaggctggtctggaactccagcctcggcctcccaaagtgctgggattacaggtgtgagccactgcacccggccttttttttttttttttttttttttttttgagttagagtctcgctctgtcacccaggctggagtgcagtggcacgatctgggctcactgcaacctcggcctcctgtgttcaagcgtttctcctccctcagactcccaggtagctgggattacaggtgagcaccaccatgcccagctaatttttttttttttttaaggtattcttagtagagacagggtttcaccacgctggccaggctggtctccgattcctgacctcaggtgatccacgtcggcctctcagagtgttgggattagaggcgtgagccaccgcacctggcctccagccaacattttaacctctctgtgcacctgtttcctcatctaggacacagggtggatggtatcagacttggtggcacagggcggtggtgagcactcaatgtgctcagcccaagttttggcacatagtagttgcgtgtctttttgaacttgacctatctaatttatatattttattttttaaattttagagatagggtcttgccctgctgcccaggctggagtgcagtagtacaatcatagttcgttgcggcctccaactcctgagctaaagggagcctctcatctcagcctccggagtagctgggaccacaggcgcgcaccaccacccacacccagctaattttttttcattttttgcagagatgtggtcttgctatgttgcccaggctggtctctaactcctgggctcaagtgatcctcctgccttggcatctcaaagtgctgggagtacaggcgtgaaccacagcgcccagctgtagttgggtgtttaacagtaacaaatgtgtatgtagctcttagtgtatatgcctcagcatcttcttccacaccctctctaggtcaatgtaaaaatctatgaatcaatgacatctctgattagagtgattttcctggggttgtgcagtacccaacctgctcaactgtccatggcaggctgcatacggagcagccactgtactaagtcctttacgtacatgaactcatggctgtggccctgtgaggacttgcacagatgagaaacccaattccccttttgctgacaggctaggaggtctcagctaaggccttcccctatcccagcctcagttttctcatttagatttggggatgacctgcagacttgtcacggggttagcaagtgggcagcatggcccgggccaaggtgggggatgggatggaggtggttattgatctcgactcaccatgctctggggggagttttgaagctcctctctccctctcctccaaggtggacagccgccacccccagggacagtggcgacaggacagcatgcggtaagaaccccatattccagattggggccctcaacccttcccttgggactcagactctgcggactcagatctagatccaagctatgccttcatggtgcccctagcctagtggggaagacagagcctgccagagcctctctaagccccatataatcagggccaagggagtaggaatccacttcctgggaggcctaggaaggcttcttgaagggcaggatattgcagctggggctttgagggatgcataggagtttgttaacaaggccctacccatgaatgcccagatgtgcttatctctgcccacacccactgtgcctagcacagccagcctcagtttatggtgagaaagctcacacccttcccacccacagcatctattctatttcctgatccccagaacctatgaacgggaagccctgaagaaaaagtttatgcgagtacatgatgcggagtcctccgatgaagacggctatgactggggtccggccactgacctgtgacctctcgaaggctgccagctggtccgtcctccttctccctccctggggctgggactcagtttcccatacagaacccacaaccttacctccctccgcctggtctttaataaacagagtattttcacagcaccggcttctagtggcttccaggaaggacaaggtcctcggtcccgtagaccctgatccgagactttgccaaatgcataagcttttactgtttttatattaggaaatcatacaggaccaagaaccgctggggtcctggccagccagggcaggcccaggatggggctccggggccatggaggcgaaggcacagtggcaggcaagggatgaggtggtcacaggtacacgggctgctcctggcctgtaaggaggcgatatgtggcagctggcatcgtcttgatatgcacctggggagtggaggcggaacggggctcagggcaggcctgggctcgtgggggacgtgggggcgcccctggccaccacccaccacccgcacacctcgccataggcctcggtgagcagctcgatgatgcgggcgtgtggcgtggccaccacactctgcccattgatctcaatgatgcggtggccgacgcggatgcccccacgctcggcgatgccaccacggaggaggctgcagatctgggggagaaaagagggggacgggaaagaggtgggggctgctcaggggccgtgctcagggccgccctacccccccaccccggggccaggggccggggcctcacgatgccgtcctccacgcagaagcccagctgctcgcgggcgtggggccggtggatgatggcggtggtgacgggagggcagtggacgatgctgagtgtcaccgacgtctgcgacttcgtctcctgtggggcgggggccgttggcctcactcagctgccggacagcctggcaggttgtagccccctctgggcctcagtttaccctctcataaaccagagacctggagtccaggggctcaattctggaagaccccctcagatgtgatagagaacagactcgggcccggtgggcatggggtcgaagctgtctgacccgagccatatcgcttccttatggccaaaagccaagccgacagccgggctctccaggcaggctgcaaacatctgtaagaggctgcacggactgtggcctcattcctctgacgggggcaggtccctccctatctctgggcctcagtttccccatctgagcaacaaaggttgagactcaaaaacatggccaggtgcagtggctcacacctgtaatcccagcactgtgggaggccgaggcaggtggatcacttgaggccaggagctcaagaccagcctggccaaccaacatagtgagactccatctctacaaaaaataaaacaataaactgggcgtggtggtgcacacctgtggtcccagctactcgggaggctgaggaaggagatttgcttgagcccagaaggtcaaggctgcaatgagccaggtgcaccgctgcactccagcctgggcaagagtgagaccttgtctcaaacaaacaaacccccccagaaattagctgtttcttgttagagagagagagtggcccagccctggagctgggccacccgcatttccatcctggctctggtactagggaggtgccctggacaagtggcctcccttctccaggcctcagtttccccaagggcacaccagtgggcaggacttaaaagttcgactttgtccctcctggctgggctggagagacctggccagggaggagacctctctgggactcagctccccttcctgggagtgtgggggccctgccacaccaggaaactcacgcggacagcggcctggcacgcagccaggggcagccccaccaggctggtcccgttgatggcggtcaggcggtccccgatgctgagggcccccgagcgctcagcaggccccccgtgcagcaggttggcgatgacggctgtgggcagcagggagccccagcccgactccaccagggccacgcccaggccctcccctcgccgcttctcgaggtgcacctgggacacacagggggcgcggaggctgctcagcagggcccggtgcaggtgcacgggtgtggggggcaccaggtgggggctgcccagcacctcactcacctcccggcagttgtcactgttggagaagtggtccaggtccccattatggaggtggcaggcgcctgggctcgggtgcacgcccacctggctggggtcaataccgctttcccgtaggaactggctgtaggcggcggcgaaggcctggccaatggcctgggcgatgagctgggcctgcggggaggagtggcgcgtccctggggtgtcccacccacctcctccaggtccccaaagtccccagggtcctcagagctgagccctcctgtccccacctggggtgagagtcccaggacacagccttctgccctggggctttgggggaggtggagagacagccgcatcttggggaatctacggggagaaggaaggggaggggcagccctgggctggggggacgatgagggaggcagctccctgcgcatgggctgtgggaaaagctatcaaagacccagccagggggcctggggcctcatgggtggcagggacagcccaggagcgggcaaggtttcggggagtcggccgagagtcttggagtcttataggaggctggacgcggtggctcacgcctgtaattgcagcactttgggaggctgaggtgggtggatcgcttgagcccaggagtttgagaccgtgttcacctgggcaacagagcgagaccgtgtctctataaaaaatacaaaaattagccaggcatggtgataccccggtggtcccagctactagagaggctgaagtgggaggatcgcttgagcctggaaggttgaggctgcagtgaactatgattgcgccactgcactccagcctgggtgacagaaggagaccttgtcccaaaaaaagaatttaaaaataagcttatgggagggaggttaaatgcacggcccactgagggaggcgacagttgcagtgaggagggcctcaggagggtggccccgcgccctggctgctcacgtcctccgcgtagaatacgtggcagagcatcttgtagaggcggcggccgtggtcctggggtgccggcctccgtgccagccgccgccgcgccatcagcaccagcacgcagccgatgtcggctgtgtaggagatggtatgcagggcgtggtccatcatggcctcctggggcgggagaggcagcctgggtgggttggggggccgtgccaggctcgatcaccccacccgcatccctggggcgggtccctgccccgtacctgggagtccgctgtcaagaccttgatcctcttggtggagacgaacaggtccacctccgtcatgggctgggtctccccatcgggggcctgtgggtggcggcgtgggaggtggaggcccccacagacccagcctgcagcccacccgcctgcccgcccggccccggccgccccctcaccttgacgcggtccatggcctcccgggcctgggccatgcgcgtgctggtgggcgggttccgttccgacaccagctgggtggaccccaggtacctggccccaaatatgacaccgtccaggaggtcttcatggtcacagggaccaggcactgagggcgacagcgaagagggtcggcccccaggggcccactcccacaggctctgccccagggctacgctctccgagatggccgggagacacagtgttctagctggtggcttagcactctccagccaggaagcacagcccactgttctagaaccatccaagcagcctggccctcacaggtctagaaccttctgtccatccctcaaggactcgcaggtgggaaaccagtgagtccaggccatggctggattcaaagccagatctagcacccacagataccttcaccccgtgtccccagaattccatgatcaggccggaaccagacagtcccactcctgcttttttgagacacggtctcgctctgtcgcccaggctggagctcggtggtgtgatctcagctcactgcaacctccgcttcctgggttcaaacgattctcctgcctcagtctcatgagtagctgggattacaggcgcccaccaccacgcctggctagtttttgtatttttagtagagacggggtttcgccacgttggccaggctggtctcaaactcccgacctcaagtgatccacccgccttggcctcctaaagtactgggatgacaggcgtgagccacgacgctccaccccccactccaatttcgaaacctccacaacattctagaaccacagtggacccctgcttcttggttctggaattccctccatcaatctagaactggccagctctgcccactgttctagaaccgtctgcagtcagcccaggatagcaggcagctctgttcccgggttgtagaaccactcagaacagagacagaccctgctgcctgtctaaaattcccatactctccagaaccccagctggttctgacccttgattccagaactctctgacaggtctcatagcaattctgtcaggagttttagaatcttattatcactctagaatcagacttctctgctccgtgattccagaacatcttaatcacaatcgcgtcaggcagctcttcctgtggttctagaatctccttcagtagttcacacctttggctacaccagggattctaagaattacctgaccagtcaaggaacaaacaattctgttccaggagaattctagacagttccagaatactcccaacccagcccagaactacataaagctttactcctggctgggtgcggtggctcacgtctgtaaccccagcactttaggaggccggggggggggggtggatcacctgaggtcaggagttcgagacctgcctggccaacatggcgaaaccccgtctctactaaaaatacaaaattagctgggcgtggtggcgcgtgcctataatcccagctacttgaaagctgaggcgggagaatcacttgaacccaggaggtggaggttgcagtgagccgagagagatcgcaccactgcacaccagcctgggtgacagagcaagattccatctccaaaaacaaaaaggaaaaaaaaaaaaaagctttactctcatggttctagaattccctgagctacccagagccagacagctctgccagtggccctagaacattctaaccagtaactacggctctttggtttagaaccacgggtgtagggccccgttctggacaccactaagtgaaattcaccctacaccacagtcggttctgcccactatccttcaggatctaagcattctggaacaagagctccactctggggttctagagagatacgtcattcactgtggtagccaccaggcacatgtatctatcacagacttgaaatgtggctcgactgaatagagatgtaaatagaaaatacacactagatattgaagatttggtatgaaaaaaagtaatttaaggtcaggcatggtggttcacgcctgtaatcccagcactttgggaggcagaggcgggcggatcacctgaggtcaggagtttgagaccagcctggccaacatggtgaaaccccgtctctactaaaaataccaaaattagctgggcatggtggcaggcgcctgtaatcccagctactcgggaggctaaggaaggagaatcacttgaacccaggaggcagaggttgcagtgagccaagattgcgccattgcactccagcctgggcaacaaggtgagactgtgtctcaaaaaaataaaaaagtaaattaaaaatattgattgtatgttgaaataatattttaaatatgttagcttaattaaaatgttattaaagttaatttcttagccaggtatggtggcgtatgcctatagttccagttactcaggaggctgaggcgagagaatcgcttgaagctgggaggcggaggttgcggtgagctgagatcgtgccactgcactgcagcctgggcgacagagcgagactccgtctcagtttaaaaaaaaaaaaagttatttcacctgtttttaattttttaacgtggataactacaaaattttaaatcacatatggctcacgttgtatttctattgtagttccatctagaactttctgattacactataattggacagctctgcccagggttatagaacactagataactattccctccatggttctagaattctccagtctgagtagaaccagatgcctctgttcaccaattctgagcattctcatcagcccagattcctttaccctagaaacagacaaaatgccaagccctggaactccctaggtgtcacagctctgctcgattctagaaccttcttagagctataggttcaaaccagtttttctctctgcaaccacagaactgtttttttttttcttttttttgagacatggtctcactgtcacccaggctggagtgcagtggcacaatcttagctcactgcagcctcaagtgatcctcccacctcagcctcccaagtagctgggattatagacccatgccacgtgcctggctaattttggggggggattttatttttgtggagacagggttttgctgtgtggcccaggctggtctcgaactcctgggctcaagcgatcctcccacatcagcctttcaaagtgttgggattacagatgtgagccacccttcccggccagaacttactatctgacctatatccttagcgaagtgtagaacagaggctggccgcggtggctcacacctgtaatcccagcattttgggaggccgaggcgggtggatcacaaggtcaggagtttgagaccagcctgaccaagacggtgaaacgccgtctctactaaaaatataaaaattagctgggcacggtggcggacgcttgtaatctcagctactcaggaggctgaagcaggagaatcacttgaatccgggcggcagaggttgaagtgagctgagattgcaccactgaaaaaaaaagtctagaacattccagagggccagaaattgttcttcccatgcttttagggcagggcttggcaaacattttctgtaaagggccaaagagtaaatattttcagccttgtaggtcacaaggtatctgctgcagctactcacctctgccattcgaacatcagagcagccatggacaacacatgaataaccaagcatgatgtgtaccaataaaactttatttatgtacactgaaatttgtttttctttttttagagacagagtctcactctattgcccaggctggagtgcaatggcgtgatctcagctcaccgcaacctccgcctcccgggttcatgtgattctcctgcctcagcctcctgagtagctgggattacaggcgtgcactaccatgcccggctaatttttgtatgtttagtagagacggggtttcaccaatgttggccaggctggtctcgaactcctgacctagtgatctgcccaccttggcctcccaaagtgctgggattataggcgtgagccaccgcgcccagcttatgcacactgaaatttgaattgcatttttttatttttgagacagagtctcgctctgttgcctaggctgtagtgcagtggcgtggggtgatctcagctcaccgcagtctcgacctcctgggctcaagaacttctcccgcctcaacctcctgagtagctgggactacaggcatgcaccgccacacctggctaactttaaacattttttgtagagatggggtcttgctacgttgcccaggctggtctccaactcccggctcaagcgatcctcctgcctcagcctcccaaagagctgggattacacgtgtgagccaccatatccagcctagcatatcattttcacatgtcaagaaatagtattctttggccaggcgtggtggctcacgcttgtaatcctagcactttaggaggccaaggcgggcggatcacaaggtcaggagttcaacaccagcctggccaacacagtgaaaccccatctctactaaaaatacaaaaattagctgggcgtggtggcgagcacctgtaatcccagctacttgggaggctgaggcaggagaatcacttgaacccgggaggcggaagttgcagtgagccgggatcacgccactgcactccaagcctgggtgacagactctgtctcaaaaagaaagaaagaaatagtattcttctttcaatgaaaaaaaaagtcaattaaaaatgcaaaggacacccgggcatggtggctcacgcctgtaatctcagtactctgggaggctgaggcaggcagatcgcttgagctcaggagtttgaaaccagcttgggcaacatggtgaaaccccatctctacccaaataaatacgaaataaaattagctgggcgtggtggcacgcacctgtagtctcagctatttgggaaactgaggtgggaggatcgcttgaacctgggagatggaggttgcagtgagctgagatcaagccactgcactccagcctggataacagaagtcatcaaaaaaagtaaagaagccccaaacgcaaaaaccatctttaactcgagacctacgtgagcaggcagtgagttgggtctggcccgacgacgatgatttgccaagcccggttctagaacccagtgctgccaatggccggagctgccccacagtccccttctcactctaccccgttctcaaggctggctctcctctccctggccagccggaatctgctcgaaaccaccctcagaggctcccgagaacctcgtccttactggcaagctgttgccaggctggtgagcctgattctggctgtctaggggccttcagtgcctgaggctagggtgggcgggacactcaccctcctggggggcagggtaggaagccagggtctcggggctctggaagaagatagaggaggggcaggactgagtctccctgcttggttccaggcagtccaggatgcctggagggcggggcgggcactacctgggcaccagcgggtggctcttcaggtgtgactagaggcaccgtctccagccagggttccggggaactgcttgagctcctgctgccctcctgctcagcagaggccccctccacccattctggggagtcagaatcctcatctgggtcctcagggggctgcaacagtcggggggcaggctctagaggctcttcaggaccagtctgggaaggcgggcattcctcgcagtgcaagaggcccagcaggtcatcccggccagcttcggcagacaggagcccgtgggcatcagcaatctcctgggaggccaggccatggcctgtggcaatgtgtaggggacagggggctccacctggggatgggcccaccagatcgcctggcagagcttcaaactgctgcaccagctcctgaaggcttgactcatcaagttccatccgactgaggctgccggggcctcctggcatagggtcccactggctgtcaggggtgaggtcctccgaaggcacaagaatgtccctgggcccctccaagtccatggctggaggccccgaaggggatcgggaaattgtggggaagtccatgcctggactccaggcttaggccggcatcttcaggcagctgaaagagagagagtcagcactgaggtttcgcccgggtgcagtggctcatgcctgtaatcccagaattttgggaggcccagaagggctgactgaacccaggagttcaagatcagcctgggcaacagagcaagaccctctctctacaaaaaatacaaaaaattaaggccgggcacagtggctcacgcctgtaattcccagcactttgtgaggccgaggcgggcagatcatggggtcaggagtttgagaccagcctgactaacatggtgaaattccgtctctactaaaaatacaaaaaattagccaggtgtggtggcaggcacctgtaatcccagctacgcaagaggctgaggcaggagaatcgcctgaacccgggaggcggaggttgcagtgagctgagatcgcgccattgcactccaaggtgggcgacagacgagactatctccaaaaaaaaaaaaaaaaactagctaggggtggtggtgtaggctgtagtcccagctacttgggaggctgaggtgggaggatcacctgaaccaggggaggcagaggctgcagtgagccttgattgtgccactgcactccagcctgggtgacagagtgaggccctgtcttaaaaaaaacaaacaaacccgaaaaacaaaaaacttgaggtttcccggctgcctatccggtgctaggctctagctgggtactgttcatacagggcacataatttaatacccactaacccttgcaaggaagttaggattcccattttacagatgaagaaactgagccacagaatggggaggtgtgaggcagtggcttcccgagcccctgtgtcatcccagacctctctcaactaatggagtctgttcactccagccctggttcttccaggtcctcctccctcaagacgcggaacccaggctggagacccagacctcacaccctgactctaccgactggtcagaggcagttccccaagaccccagacccaagaccccagtcccatgacctcaacccccaatacctccatccagaactttagacccaggaccctggacttaataccagagacccaagacgccataaggcggaccccagtctccaaacctccaatgctaccccaagatcgactccagactcagaccccgacttcaggacccagccccaagcccagaccctagtcccccctcagaccgaagacctcaagcgccgactcagactgcgctctgcacctcgaggacactcacttcccaaatcgaggccgcctcagccccgcgcagcctccaggaccccgctccccacggacggccccgacgtagcccgggccgcgtccccagaaggcgcagctcggggattcccggtcccggcgcccgctcctctatccgcgcagagccctggcccattgagcatgcgcggcctcgcgaggcctgctgggaaatgtagttctcccacccagcctcgccacgcgggggcgctgggacaactgcagatgttggaggggagttcgaatcccaggcttcccggcccgcagactgccccggctggccccaggacctgtttgttctcctgcaaaatagggttaataatcactgcctggctctgggggctgtgttcattattccaaaggatggcagatggggagaagtggggttgggaaatattaaagaagtgtgagaggtggtttccttgggaccttgaggcaccggaagcgtcgtggagaccctgttaaagacggactttcggtttggctcacagtagggagacacataggtgcaccatggatttggggtcggcctgggaactttacctccctgagaactcagtttcctcattataagctggggaaaaaatagtacctacctctcaattgtgaggattaaattagatcaagcgggttaaggatttagcagtagtagagctggaaaagaatatataaaatatatattattaatttatatattatatataaaacatactatatattatatgtattatatatgttatatataattttaaaaatataatgttataaaaattaacagtgattagactccagccctactggagtatattagactcattgttaatcttctttttttaactttaaagctttgaataattactcattggatggaatcaggaacatataaagtgtgatatttttagtaaatgttatgtaattgaagaagggcaagaagtcaatgaaatatcccttgaacgcctcctcctatagtaactgtgtatgtctacaaaagtctgaagaaatcaccatagattatgaaagcttgggagaccgcatttcccagacacctccacggggcctacacttccacggggcctacaactcccaaacacccttgggccactgacgtcttccggaaacgtgcacttgcaagctgcccgcaatacgtcatggcgaccaaacgccttttcggggctacccggacgtgggccggctggggggcctgggagctcctaaaccccgccacttccggaagactcctggcccgggattatgccaagaaaccaggtgagctgggttaagaggaaccaaatggggacggtgggtgcactgaggaattgacagtgcgcaggcggtggttggggaggtggtgctagaactgatgcgcaagcgcagagaggcggatgccaggctgtatgcgcaggcgcagtttgagggacccagcgccgcttggagctcgggcgtctggctcggagatactgtagcgattggacccagggcgcaggcgccagcttggggcggagcggcctgggaggaggatgtggttacgtggagaccacgcgtttcactgcgcaggcgcgggttggaaaggatttgaagggagtctggggaggtcatgaacttgggttccagttctgtttctctgcctgcctccaaatcgctgggtaaccttggccaagacgttaccaaacattcaaagaaattatggagcccgtttaattggccacttcagcaagaacaaaacaaggttattaaggtttagctggatacagccttgcctgatctcctttgttgaaagggggaaattgtccaatgttcggccttaaagacagacacatagcagacaaaatataacttgaatgacttggtcattccaagcatcggtgttacttaatgctatgtccaaatcccacttaaagttacttaatgctgtgtccaaatcccacttaaagtgatttcgaggccaggcatgatggctcacacctttattcccggcactttgggaagccaaggagggaggatcgattgcttgaacccaggagttcgagaccagcctgggcaacatagcaggaccctgtttgtataaaaaaaaaaaaaaattgcctggcgcggtagctcacgcctgtaatcccagcactttgggaggctgatgcaggtggatcacaaggtcaggaattcaagatcagcctgaccaacatggtgaaaccctagctctactaaaaatacaaaaattagtggggcatggtggcacatgtctgtaatcccagctactcaggaggctgaggcaggagaactgcttgaacccaggaggcggaggttgcagtgagccgagatcacgccactgcactccagcctgggcgacacagtgagactctgtctcaaaataaataaataaataaataaaaataaaaataagcggggcatggtggctcacaactgtgatctcagctacttgggaggctgaggcagaaggatcacttgagcctgggagtttgaggctgcagtgagccatgattgtgcccctgccctccagcctgggcttttattttttatttttttattttcttcagacggagtctcgctctgtcgcccaggctggagtgtgcagtggcgcaatcttggctcactgcaagctccgcctcctgggttcacgccattctcctgcctcagcctcccaagtagctgggaccacaggtgcccaccaccatgcccggctaatgtttttgtatttttagtagagatggaatttcaccatgttagccaggatggtctcaacctcctgacctcgtgatccgcccaccttggcctcccaaagagctgggattacaggcgtgagccgccgcgcccggccgggctgtctttattttttaattttttagattttttatttttttgagatggaatcttgctctgtaacctaggctggagtgcagcgatgcgatctcagctcactgcaacctccgcctcccgggttcaagtgattctcctgcctcagcctcccgagtagctgggatcacaggcatatgccaccatgcccagctaatttttttttttgtatttttagtagagacaagttttcaccatgttggccaggctggtcttaaactcacctgacctcaggtgatcttcccacctcggcctcccagagtgctgggattacaggcatgagccactatgcctggctgagaccctgtctttaaaaaaaagttttgagtggccgggcgcggtggctcacgcctgtaatcccaacactttgggaggccaaggtgggcagatcacgaggtcaggagatcgagaccatcctggctaacacggtgaaaccccgtctctactaaaaatacaaaaaattagctgggcgtggtggtgggcgcctgtagtcccagctacttgggaggctgaggcaggagaatggcttgaacccgggaggcggagcttgcagtgagctgagactgcgccactgcactccacctgggcaacagagcgagactccgtctcaaaaaaaaaaaaaaagaaagttttgagtgtagcagagtccagccaggggcagaggccacctgagacagggttctgtgagagaagtttggcttccagaggaggggctgggctgaaatgactctccctctcgtctccccagttatgaagggggccaaatcgggaaaaggtgcagtgaccagcgaggccctcaaggaccccgacgtatgcacagatcctgtccagctcaccacatatgccatgggcgtcaacatctacaaggaagggcaggatgtacccctgaaaccggatgctgagtaccctgaatggtgagtaggccaggctgtgtcatcctgcaatgactattccttcctccgccccaggaggaccccttcccggagaggcggatcgccactccagccggagcctaatagtcacacctacccatcctggctttagggcagggggcttcagggctctgcccatctgtaatggggtgatgggacccatccctccctcagagggctgtgaggaattcatgagattagaacacatgtcaagtacctaaaacaatgctttatcttaagcaaatacttaaaaaaaattttttttcaggctgggcgccgtggctcacacctgtaatcccagcactttgggaggcaaggcgtttggatcacctgaggtcaggagttcgagaccagcctggccaacatggtgaaacctcgtctctactaaaaatataaaaattagccgggtgtggtggcacattcctgtagtcccagttacttgggaggctgaggcacgagaattgcttgagcctgggaggcagaggttgcagtgagctgagatcacgccattgtactccagcctgggcaacagagtgagacttggtctcaaaaaaaaaaaaaaaaatttttttttttcttctatatggagtcttgctctgtcacccagtgtggaatgcagtcatgtggtcttggctcactgcaacctctgcctcctgggttcaagcggttctcctgcctcagccttcagagtagctgggattacaggcatgcgccaccatgcctggctaatttttttttttttttgagatggagttttgctcttgtcgcccaggctggagtgcagtggtgtgatcttggctcactgcaacctccacctcccagtgttccaatgattctcctgcctcagcctcccgagtagctgggattacaggtgcccgccgtcacacccagctaatttttgtatttttagtagagacagggtttcaccatgtttgccaggctagtctcgaactcctgataacctcgtgatccgcctgccctggcctcccaaagtgctgggattacaggcgtgagccaccacgcctggcctaattttgtatttttagtagagacagggtttctccatgttggccaggctggtcttgaactcctgacctcaggtgatccgcccacctcggcctcccaaagtgctgggagtacaggcgtgagccgccgcacccgtcctgcaaatacttattgaccactgactgcatgccaggccctgctctaggcttgagggatacagaagggctcaaaacagacacaagtccccaccctggcggagctagctggggaggcagacaggaaggaggaagtcaggcagctgtggtggtgacacttccaggaagggggcaggagaatgagggacagagccggggtgtttggctgctctagtttgaggtttgggggacacagaagccaagacgggagtgggtggaaggggctttccaggcagtgggcacagcctgtgcaaaggccccggggcaggaccgcacctggtgtgctggaggaacagcggggaggcctgtgtggctggagcacagtgaggagggcgagagagggaggaggtgagggcaggacctgtgggctgcaggaagggttctgctgtggccccaagctgatctgaaggctggggagggtcaggaaggctgagcaagtgggggcaggtggcatgatgtggacagtgctaggaggcaggagagggcttggcgtgtgccagcctcagatgtgccactgggatggggttggctccattgctgcatggccagggacccacccagcccagggtcggggagggaccaccctgagatcatgcagccaaccagtgggcctggcacccagccccgtcgccgcctctgcccgaggtgcccgggacaccagggagcccaggggtcaccgtgtagctctgattcctgcccgcacccccgtcaggctgttcgagatgaacttgggtcccccaaagaccctggaggagctggaccccgagagccgggagtactggcggcggctgcggaaacagaacatctggcgccacaaccggctgagcaagaacaagaggttgtagcatggagggcccggcatcgctgacccccacgccgagggcttgccgttttcccggaggacgtggacttttgtgagacaagaggcggctccccagcctgggtttccatgtgaccccacagtggggctggaccagggccctggaggccaataaagagctttctgggtagaccctatttccccttggtattgtctggtgtcggcctggcgggaagtgggtccctcagaccccagggatcccagcctccaccccagccagtggtgggccgtctgcaggtcccctgtgcctccggcccttggtgggcttctctccccaactcctggaattcctgacactgctcacgaggccccggccccaaatctcaagttgctgggtgagggggttgtcctagctaagccactcttggttgcaagggactcaaacctaactatctcaagccatcagagtcagaaaagaggctttatgagcttcaagaaaggagatgtccggagcgggtagtggtgtggctttaggtgtggctggatccaggtgcttcggtattcagacccaaggctctctccatctcagggtccttggatcccccaggggctggcactcatgggcagggtagcccgagggctcctggccgacgtccccaccagcgcagcaagtagaatcagagggaagggactgccccttccttcctgctgcagtcacagcgtggtcctcactggcctatccctggagcccaggggcttgggccttccttccccacccccaagtcctctgtccactccactggagcccaggtctcaacctccgcccccagtccaccctctggagtcggctttcggcaccctgaccctgacccagggtctgaccctaggcctgagtgaggactggcctccctgcagtcccaacaactcctgccctgcctggctgtgatggggcgggatcacgagggctggagtccaccagattagaggaggctgagggtgacacgtagttagggagtgatggggcctcttgctgggggtagatcacctcatggaccccacgtcctgcagaacccccaagggtcatgccctcggccccacccttgccacagcagccccacccatgcctaggtgggtgccctgggggatttggactgggctcacccaccctccggcttcctctgtccacaagctggatgggcggggcggggcccgtctcagggaaaccctaaccttcatcctcttaggggactctggagtggaggggattactgcgcacctgctgtccccggcggcctccctgggcaggcgggggtgtgagcgcgccttctctcgcgctcactgcaggtggtgccagccgttcccaccctcctgttgttccccaaggttctgagggtaaaaatcaaagttataacagccactggccctgcctggcctccccatcacctccctcctccccctcctcactctgctccagccgcatgggcctcctcgctattctttcaatgcacgaggcgtggtcctgccccagggcctttgcacagcctgtgcctctgcccagctccctccttccctagaccttctccctcccgcccccggtctctaccttcacgccagcctcccctcctccagaactccctattaaaattgcagcccctgccacactccacatctgactttcctggtttttttttctccctatcacttatcactgtctgaagtcttttgttttagatttgttttttatttgtattgagtcagggtctggctctgttgcacaggctggagtgcagcagtgtgatcacagctccctgcagcctcgaccttctgggctcaagtgatcctcttgcctcagcttcttgggtagctgggatgacaggtgtgcaccagtacacccggcacattttaaaaacgtttgtggagatggggtcttgctgtgtcacccaggctggtctcaagcaatcctcccacctcagcctcccaaagcactgggattacaggcatgagccaccgcacctggcctggtttagctttaaaaaaaaaaatctttcttgtgcttactgccgtgtccccactgcctggtgtgcggtgacattgggtgatggcggggcgttggaccacaggactggtgtgtgaggtgccgcctagagatggggtgacctggtgatctgggagtgatctggggagcccaggctggagacggggagggtagctactgcagctcctgccctggtgccgcacttctgtcccgggaggtggcgctggcccagactgtcccatcccatgcctcagggccccctcctgctgcactgggccagccgtgcttgccagtcccagcgggttctcggccccgcgacagcctccttgctcagagctcttgggcgatgcggctgggttggacagagcagatgctggccatgcctccactggggacatgcacagggcctggggtctgtggggacgtgaggaacggtctgacgatgacgacacacccagcatcagcccgcctccacctggaggcccaccagcacctggcccgggacccaccctctctccagaacctgtcgctgtgccccggacggtaggaccggtgatgggtctgaaaggcagctccatccactcctggccgtgcgactttggggacctggcttcctgcctaagccccggtttccctctctatagaatgggctgacagctgtgcccgaggtccagggcacaacggagaggggagtgctcacatggcgagcacacggtgagaggagaccaggctcgcgggagctgctgctatttgttatttccaggggactgggagcctggagagtgggcagctctgctgatggggattaggagaagcagagagatttacactcatcttacagagtcagcggtcccgccacccacagcctcgcagccctcgaacctcggaggcccccacgcccaattaacagacaggagactgaggccccaggaggggaggaggtccccgcacctggcctgagaatacttgggtcacctcctgcctgacactgggggccagtccgctgccagcaggacgggtggcgatggggtgggagacgggatgggggcagggaacccagcagcctgtctctctggtcccgctccccagtggtggtggcctggcctgaccacggttgctccatgacctcggcctaggccaaggcgtggtggctgtcaccagggcacgtccccggttctcgggttgggccgaggagggggcccgggagggcggcaggctcaggctggcggccaggccctgtccagagcctgtgcatgttccttggccagcagccgcagggacgcctcctccagggcgaagccatctgcgaaggtgggagcaaaggcatgaggcccgaaggacgcttgcagccccgggcccgggcccaggaggcgggggaggcctggcacggccggcggtccggggcccaaccagggctccaggggcagcgacatggccggggggcgggcgaacggcagcgctggggcctcggggagtctcggagctgccacggcacccgagcctgactccagccgctcctggcggcgccacttggcccggcggttctggaaccacacctggagggtgcgagagggaaggggggttgctgtgagctcagccgctccccgccaatcctcggaccccctctgcacaccccagccctgggggttctgactcccgtctgacccgactcctacctgctgcttcgctgttctgccccaagaagatgaggatctcccaagcgttccctaagcccaggctcccctccaactcctcactcccctccttggcctcccttggcccttagcaagtaacctgagctgcctaacgtggcattcaaggccttcaaaagcgttgttacccacaccattctctgcctcctccttcacccctggctcaagggaaacgcctccaacttaacccctccatgtctttgcacacactgttcaggatgcctagaaaaactccccttttccttcccagctggcacactcctactcaaatgtcaaaacctcagctcccacaccccctcctccaggaagccttcctagcttctcttctgctgttgctccgggagggtcaggatcttgctttgcctccctccccaggttgcaaaagatgtgtgtgttggggggtgccctcacctgcacgcgcacctcaggtaggtgcaccttggctgccagctcctcacggctgtacacatccgggtagtgagaggcctcgaacgcccgctccagctggtgcagctggtaggtggtgaaggtggtgcggttcctccggtgcttcttcttgggggcctcctcgcccggccccagacccccaccctcggttgccggcccctcgcccgggctcaggaacatggctcccacctggtgggacggcagcgggacagatggtggggagacggctgggggggctaccggcagggacagggcaggggagccccaggcttgcctcccggctccggggaaatcggttccctccactggggccggcatgcgctctgcatccccaggctgtcctcctcgggcttgggggggtctcctgctgtgcctctgtctgctcttccttctctctgtgtgtgtcaccgtccctgttttctcttcccctctctgtgactgtcacggcctgtgtgtgtgtgtgtcggcgggggggggtcaaggatgcccccccgtcaaggaaggcaggatcccttctcacgccctaagccctccaccctgaggggatctctgcccccaccacctcctacccaggcccaccagtgcccaccccgcactcaccgcccacggcagcccctccgtcgatttccacgggacacctgccccagcgggcctggcgctgcgtctgctgtggcctggccctgccggagccgagccaggtcggggctgcgtgggggaggattagctcaaggtgattaattgaggcggcccctcccacttggtcctgggctgttctgagccaggagggagggcagggtggatggagggctggggctctaagtgggtggctggggggatagtcttacaggctccacggccccttgccataagacggcaagggcctctccctctctgggcctcagtttccctggctgtaaaactgccacactaggacctaccctggggggatttcagcttctcagagcatcgcacagaaattggcatacagggggcacttaatgaatgctcactgttaatatttttatctgctgggggcagaaaaaggtgtcttagaactcacagatgtcagaggcagttggggaagctgaggtccagaggtgaaggcactgcagttggttcctctggacacaaggggtagggacccttttagctgggtctggaggtatgaatagacgttcaccattcacagccgggcgcagtggctcacgcctgtaaccccagcactttgggaggctgaggcgggcggatcacctgagatcatgagtttgagaccagcctggccaacatggcaaaaccctgtctactaaaaatacaaaaattagccaggcgtggtggtgggtgcctataactcccagctactcgggaggctgaggcaggagaattgcttgaacctggtggggtggagcttgcagtgagccaaggtcatgccattgcactccagcctgggcaacagagtgaaactccatctcaaaaaaaaaaaaaaacaaaaaaccaaaaccaccaccaacaaaaaagaaaaacagaagttcaccattcaataaacatttattgagcacttactgtgtaccaggtactgctcacagcagtagtgaccaaaacagacagaagtcacggggctgactttctagcagggcagacagacaaccaaccactgtgttaaaatgcagagcgtggccagtggccacgagcctagggagaaaacccacggaggggggcctgtgggggcaaggtgggttgatatttcatttagtttttgggtttttttttgagacagagtcctactctgtcgcccaggctggagtgcagtggcacgatctcagctcactgcaacctccgcctcctgggttcaagcaattctcctgcctcagcctcctgagtagctgggattacagacacctgcaaccacgcctggctaatttttgtattttttagtagagacacggtttcgccaccttggccaggctggtcttgaactcctgacctcgtgatccgcctgccttggcctcccaaagtgctggcattacaggtgtgagctaccccgcctggcctatttttgtttttttgagaaggagtctcactctgttgcctaggctggagtgcagtggtgagatctcggctcactgcaacctccgcctcccaggttcaagtgattctcctgcctcagcctcctgagtagctcggattacaggtgcgccaccacgcccagctaatttttgtatttttactgaagatggggtttcaccgtgttggccaggttgctcttgaactcctgacctcaggtgatccacttgcctcggcctcccatagtgcaggagttccaggcgtgagccaccgcgaccagtcgggttgctatgttaaggaaggtggtgagaatggaagatggagtgcaaagccgcaagttctggacacatggggtgtgaaggatggagtgctggggaaccatgggaggttgtggagcagggacacagtggcattttatacaaacatcaatgatgagcagctgagaaaccaggggcaggtgccaggcaggtgaggctacagggtctagtcaggccaagggccgggggagatggggaggacagaagggtgggggtagcaattccagaggaaggaagctggagaggggcagggtgtgggtatggaggtgcaagggcgttgcccaggcccattctgggctgtgaggtgggactgtttcagaggcagaggcctgagaggtggagcgggctccaggggaagccccagagacgagtgccccccaagtccaaggagccagggggctcaggcaggggagtgccctagagatggaaaggagagggtactccagggacaatgggaaggggagaggaggggaggcctgatttagtgacatggaggacaggggggaggtgactgcggtggagtgagggggagacccaggcctgtggatgggcgaaggggccagtgcaaagtgaactagagatccttccagaatgttggcatgttggctttgaagggagagacacacaaagaaagagagacagagacagagacagagaaaggcgtgacacacacacacacgagaaaccaggtgcccaggccccagagtagtcccggtcggatcccagggggcaggtggcttcggcccaggatctgggtgtagctcccccatcccaggggccaagttcaggtgggcaaggtgcagaggcaaacaggggttcaatccctggccagaggggtggctgcagcttctgaggctccaggtgcctcccctggcctcagctgcccgtcggcaaggtgggcccaccaggctctgtgtccaaggtggagccaggcctgtcacccatcgagggacagggctgtgggctggggagagagaactcccctgatcgcttcatcactttagagcactaacgagctgcttcaggtctcaggccgcaattagctaattggccagtgtgggttaagaggccccaggaaggatcgtggcgtgaggcgcggcggggggggctttgggcgacttagccggacaggcagaagctgcagacgctgtgtcagcttagagggccggattaggagcgcgggctgggtgggcagggccaaggggacaggtggccccctgcagtggattaggcagaggccaggccactccgggcctttccagcctccacctttcaattttccccaagaaagaaccactaacctgcctcaggtgctggtggggagagtgaggcccgagggtgtgcagggctttaagggggccacacaggaggtcggcgtgaccttgggacatttccgtgtctcagctcaggctctgcttggccaggatgggagggtgggctgggagtcctggggtgggggccatacccagcctggccagagacccctctccgtgtatcctaaaggctggctccatgggactcagctgagagcaggtgttggaccgtcccagcaataatggagcaccagctgtatgcctgccttctaggtgcccctcccttcactgctcacacccctctgggaaaaggtgtccattggctggaggaggctgctgaggcccagagagggtaaaagctttcccagtagggaccacctctcccctgtttgcccaggactttccctgttttagcactgaagtctgacaccctggaacagccctcagccctgagcaaaccagggtggtcacaccagggtggtcaccccagggccagcgtcacacagctggggggcgagtcaggattgaacctgtgtgtgcaaagtggatccccggcccgctgtgccagagaggacaggagggccagtgtttccctgccattctgccccccagagtcaatgggtcagcctgctaggtccctggacatttggactgcctctgtccaaggacagtgtcacctgagagctgtcactgcagaagctgtggtgatactcagtgcccagagggccagcacacagtcagcctgagacagaggccgggacgcccatgctgcacaactcccgggccagcttctcagccaacttgcagaagggtgcccagcgggcgggctctacctcccagcagctgctcatgaggacatgcatggggcctggacagcccttgggggctccatgtggtaccccttctccacagcctctgacacctccttcagcctggctttgttaagaggagaggtggatggatgtgtgaatggatggtgggtgggtaggtggatggagggatggatgaatgggtgggtagatcaatggaacagtggatggagggatggatgaatagagtggatgggtgggtgaatgaatggatgggtacatggatggacatgggaatgggtgggggatggatgggtggggagatggatagataagtggatgggttggtggatggatgcatgcatggatgggtggggacagggggatgggtgggtgggtggatggatggaaggatggatggatggatggatgaaaggatggatgggtatgtggatggatgatgggtagataaatgggtggacagatgtgtgagtggatggtaggtggatggatggatgggtggacaggtggatggatgcatgggtggacggatggatggatggatggatgattgggtggatggatggatgagtggatggtgggtaggtggatgagtggatggtgggtggatggataggtgggtgggtggatggatgagtggatagtgggtagatggatggatgagtggatagtgagtgggtggatggatgagtggatagtgggtgggtggatggatggatggatgggtggatggatgagtggatggtgattgggtgggtgaatggatgggtggatggtgattgggtgggtggatagatgggtggatggtgattgggtgggtggatagatgggtggatggtgattgggtgggtggatggatggatgggtggatggtgattgggtgggtgtggatggatgggtggatgatgggtgagattttcatgattggttcaggccatcatgaaagaagcagaagtgagagacatgcagaagtgggagaggcaggagcaggaagagaggggaacgaagcctgggctgtggacccagacaggcccagattcaaatccaggctctaccatattttcttggggcaacccagtgtgagcaacctgccctctctgggcttcagcgtccacgtctgtgaaatgggtgtaatcctggcactcacctccagtggcattttgggggtctgacctgaaagcactcaacatggggcctggccatgaatgggggaggcaggaggaggagggtggcctccccaggccatccctaaatggggctgctgccacacatgcagaccctcctggggctcccatcatgggggctcccatagggatatggatggctggggcctgagaaagggctgtggtgggaggggagacttggaccttgagggctgttggcagcctcccaagatcctttaagcctgggaccccatgggttgggaaagggtgcccaccactgaataccacatgccctgggggactgcagtggggaacccgtgggtaatggcaagtgggtcccctgcccagaatcccccagggaacggtgtccccacagtggccagcaggcaggtgccagctgggcagatcctccatgggccaagatggggaggcccccgtgtgcaggcatgtggccacaggaggcaggggcttggggccggtgggtgcccaagactcggccaaggatcagtggggtcccaattaattgatcccatcatgtgggctgcagtgggttccacagagtaggaaggtgaccactggggctggggcacacagggcatctagggggggtggacctctaagggaggacccaggatgcctggcgcctgggggtgtccgagagcagatcaccaaaggtggcccccggggaagagggcacggggacacagagacacacaggcgcctagagtccttagaatccgtctttatcgggcgatcatccttcgcaggtctggggtgtccacgggccgcccagagccccctacgtgggccagcccctgctgtgggcaccaggaggatgacttgcccgcctggaccctccttgggcctggtcagtgcccccacgccgcactctccactctctcggtcctctggggccaagggccccaccgggtggggtcagggctcctggcttcggggcgaggtggagccgtcggcgtcctgccctgagacggaggctggggcacctgcactgcgtagctcccgggccagcttctcggccagtttgcggaagggtggccggcgggcgggctctgcctcccagcagctgctcatgaggacgtgcacggggcctggacagccctcggggggttccatgcggtaccccttctccacggcctccgacacctctttcagtgactgcggacagcaggcgtgggcaggggtcagggccacagcctctggacctgcccggaacccagtgcctccctgggacccccgctcaccattttagggtacggagcccgtccatatgagaagacctcccagagcagcaccccaaaactccagacatccgacttgctggtgaacttctgtggggcccgagacgggggtgaggagggacccctcaggttttctgctccagcccctgcttcctccaggaagccctcctgggttgaccctcactctctggtcttctcctaattgagtcctcccccaacgccgcccgcagttgagtctagctcagccttagtgcatgaaggaagcctggttattcttcccttcagtcctgagcccacgcctttttcagagctggagaaactgaggcccagaggggggctacgaggaacaattatgggccaagagcttcctggggaggcatagccattgcccttggagtttcagagaggccaagggacatacccagggtcatacagcagagctggggggaccccaaagccccaggggtatgtgaaggcagggctcaccccgtgtttgagagcctcgggcgccgtccacttgacgggcagccggcttgagtctagccccttccgctcggctttggccaggccaaagtcgctgaccttggccaccaggtcctctgagaccaggatgttgcgggcggccaggtcgcggtgcacaagcttcttgctctccaggtactccatgccctcggccacgtgcctgggggtagtagggggcagtgggggctcaggtgccaggatgcccacattcagggctcagaaagctcggggtgcctggggccacaagctcacaaagcctccctgccccgtgcctcagtttccccttgatggatcttggaatctgcgccccgacgaccccagtgccgcagcaccctgagagtcccacttacagagaaaactgcaggagctgagcggtgttcacgagggctcgaccccgggtccgcagaaagttcaccaggttgccctgttgggggtgggagatggccgcgggatgttggggctgctccgctgcgtgggccccctccccgcctgggccccgccccaccttgctcacgtgctccatgacaatgtacagcccctggtgcaggatcacgcccaggagacgcaccaggttctcgtgttgcatcttcctgggggcggtggggtgggcgtgagggcagggctgggaccccccccgtcccacggtccccagccccaccctgggactcacgtcatgacggccgtctcgtccaggaaggcctgggctgtcacatcacacttgatattcttcacggccaccttttgccccaggtactcaccctgcaggacagctggggggtgggggtggggaacggggtgagatcaggacccccaacaaacagggacagagagacagacggacaggcccgctcacaccggtgcccatgtaacattcacacagctgcgggtccccagaccttgaaacacagaccccatgctcctcacccctgccgcccttgcaagctccagacccaagatcagagaaccatctggctctggcgcggtggctcacgcctgtaatcccagcactttgggaggctgaggcaggcggatcacctgaggtcaggagttcaagaccagcccgactaacatggagaaaccctgtctctaatgaaaatacaaaactagccaggtgtggtggcacatgcctgtaatcccagctactcgggaggctgaggcaggagaatcacttgaacccgggaggcagaggttgcagtgagccaagattgtgccattgcactccagcctgggtgacagagcgaaactccatctcaaaaaaaaccccacaaaaaacaaaaacaaagagagaaccatctaagccaggggtctgtgaacccccaccccctcggggccaaatctacctatcacctctttttgcaagacccttcagctcaaaatgttttttgcatttttatttttaattaattaattatttatttgagacggagtcttgctctgtcgcccaggctggagtgcagtggcgccatctctgctcactgcaagctctgcctcccaggtcacgccattctcctgcctcagcctcccaagtagctgggactacaggcgcccaccaccacgcccggctaattttttttttttttttttttagtagagatggggtttcaccatgttagccaggatggtctcgatctcatgacctcgtgatccgcccgcctcagcctcccaaagtgctgggattacaggcatgagccactgtgcccggccaacatttttatttttaaaatattgatacagggtctcactctctcacccaggtagagtgcagtggcgtgatcacagctcactgcaggttcaaattcctgggttcaagggatcctcccatcccggcctcctgagtagctgggactacaggcatgctccactgtgcctggctttttttttgtacagatgggggtctcgctacgttgtccaggctgcacctgaactcctgagctcaagggatcctcctgccccgacctaccaaagtgctgggattccaggcatgagccaccgtgcctggctggtttttgcatgtttaaatggttgtaaaaacaaatcaaaagatgagtgctgtttcaggacatgtgagcattacacaaaattcaaatttctgggtcatagttttcatggccacgcccatatgtttacatattgtctgtggtcgctttcactccacaagggcaggattcagtagtggtgacagcagctacctggcccacaaagcaggaaatatttacaatctggccttttacagagagtctgccgacccctgatctaaaccccagagccttccagaataataatttcagggaatggtgtttcaaacattccaaacagtgggactgaccatacaagaccctggcagtgtgaagaagtcactaacgttgactgagcgcctgcttgagttcacttactcctcatgacagctgccattaccccctgttccagagggggaaactgaggctcagaggatttgcacgtcttcagctgcacaactagtaggtggttaagtatgggtttgaattcagctctgtgactccaaagcctcaatacgcacctcccatcttccttcagcacccccaacccagtccgccactcacctccaaactctccctctccgatctgtgctcccaatgtcaaatgctgcaggttcagtaaccagcccgctgtggagtgaagacccagtcagaggggtaatgggccccctaaatcctcccattgggggttctacttggtgagagactaggtgatgtctctcacagtgctgcagctgtggatacacatttgagtggctgctgggcctggcaatgcccctaggacatatcagagacaccccactcctggtaccaattattgttgttgcaagcaacagaactatctcaggttgacctgaacaaaaaggggcttacaggagggatagtggtgtgaatagtcaaagctgggggcctgcctggctgagaccctcagaccccacacttgccctccaggaactcccagtcaggcccaaggggtagtgccaggaaacacttcagttctcagagataagagctgcccttttctctttggctctcttgtccctccaaataccctctgggctcttccctacacagttctttacctctgaccaccccagaaacacacacagagcaaaaaaacacaacatggagacccataaaggttccagaatattccagggctctagcctccctgacccttctcccaagcactcctgtgttgtcccctccactgccctctggtcggttctgcagacgttctcttctccctccagaaagtgccccctccaaatgccacggtcttaagagatcattggccagggtgatgctagtctccacctggatgccatccctgatgggtacagacttccccagcagagagatactttcaaggagacagacatggggtcagaggaggcatttgcttttgaccttaaatattgaggatttcactacttaggggctggaaaagcatttcaggtgaagggaacagaatatacaatggctcagaggcatgaagaaaacgatgatcacagttgacctgggagggggtggatgtgtggaggaagggctttgcagatgaggctggaaaggtggctcaggccatgcaggcaggttctggaaggtggtggagctgctgggcctctctccctggaggcatggtttcatgatagaaagataaccttgaggctgcactcaaggcctgggctggaagggggactcgccctctgggaaggaggcggtctgatgggagggcctgaggctgggctgtggggaggggaggggagaagattcaccaggtcttgggaacctggccaaggagggaatgctggaggatggggtgggtggaggttcggggccaggtttctggctcagatggtggatgatggtgacagatgagtggcgaagctggggacctattgaataaaggactgatctgtgtctgtgggcacccccgaggcagcccaggtcttctatcccatagctgggcatggagacaggcttgggtgatctggcctcagaggtgcggggccccagggcccttcctcccggactgggctaacgtgggtagggaagggggtctgccctcctgggcgtcccctacccctggccagctcctcctcggccgacttggtcccgtgtttccgctttggtctcaccagcttggtgcagatagcgcccttgtccttgctgtaatgctgcaggatggtgggacagccatgagcccagccccagggaggggaaccccagcatcctgttccgttcccgggtggcctctgggtggggtgggtgggaccggggaggaggagaaaggctggtttccataggaacgggaaaggaggcaagccaaaaggagggggagtcctctggattggtatcaacttggggggtcctggggggtccccagaggagtcactctagtccctggaggtagaaccaggctgactcaggccacctgtagattgggcagtccatagggatcagcccccctatttctgcattaaggggaatcctactgtgggggtcctcctgtctgcccatctgagatgggatgggggcctgggggtgcctggggggccctggggaatacccccttcatctccacattggggaagcacagagctcagggggtcccgggtgatcagcacaggaggtagggatggtgtctgcccagctgctggggaagggatggaggtcaggtgacccgcccctctatctctacgtaggggagtctccggagtccctgggctgccccactgcagggacggggtggggcctctgggtggcagcacctccaccatgtccatgaggttgcagaagaacacggcctcatcgattgtgaggtggccgtcgcggtgcagcacgcggtagtggatgacgtcgcggccaaagctcacgcacaggacgtagtcgccggggtggcgcgcggactcccgcaccaggaacagcccatcctcgggaggctgcagctgctggacagcctcctggcccgagatcttcccgtggaaccacctgcggccacggaaggggtgggtcagactgggctgtggagggggggtcacttgctgtcccctaccccaggcccctgtcctgcccactcacggcatgaggctgagcttggggtctgcggagagggcctcccgctcccgcagcgccccagctgccagcagcccctcctgtccactggtgtggtgcttgacgcggtaccagctcttgttctgccagggaggaagcacggggttagtgtggggggtgtgggggtggtcctggtggagcccccagccccaagcacccacacccgccggccacctctcacctcgcaggcctccaggatggtgaccacgtcgcccttgcggaaggccagctcccctggcttggggcgggtgtgctcgcatttggtgatacactgggtgcccggggcccagcgcctctgcagagggggccgggagaggggcaaagggaggacatcacggagatgtggggagcagaggcacgggaggggaaagaggacaggagggagaaaggtatagagattggaaaagagcggagaggcagagaaaacagacgcagacatcgggggaaagaaagggggagtggggtgctcagagagaaatcgtagagtcacaaagagaggcggcctgggacagaaggtcaggaagccaagatgactgagaaaggccaggccgaggccagcagaagggggtagggggcagagagtacagcccttcaggaaggggtctcagggtgtggacggagttgaagaaggacccggggagcagaggaagcaggctagacacactcaccgttggcatcctggctgagacgggaggggggtgccaggctcggaggaagcgggggctcacctggggaggggacagagtccaggtgggagctgggctgggacccacggtccagttcctaccacttccagcccaggtcaggtgggggcgatggctgggcaggcagagagagcctccccagaggcatcctggatgggacccagaactggctccccaagcccctgtggggaagtgatctttacccggggaagttcctcagcagaatcacagccgtgaaatgcccgccaggaaaccagagagcctcgccccgccatcgcccccagagggaaactgaggcaggtgagaggcacactgagcaagtggtcacagtcggggacgctgggaatggcctgccacaggccagtcggctggcacaggaggtagggagctgggtgccactggaccgagcctggttcttcctgttttctggttggtaggcaggggcagggtggggaaatagggatgagtcaaggtcattcccaagaatctctgaccgtggggtggagctgggggcaggggcgggtcctgtagccctgctgggctcctccggccacccgctgagcctctctgatccccccccaaacccaggacagacacacaaagtcactcattgctgcaggggtgggggagcctccctgcctcccccatctccccgaccgctagtggctgggaagtgggcggtgctggggggtgagtctcggcccctccaagatgcgcctcccatgaaatcctccagtcccacgtgtactcacacgcatacggatgcatgcacacgcacagaaacacacagggctcggacacagctgcgcgcagacaagcaaaggaccacgtccacgtggaaacaggtgtgcgcacacgtccccgcgcatccgcgcgcacaagcgctccacacctgggaacgtgcgcacctgtcccccgcccccggcacacacacagccgccccacactggaacacctgggcgccagcgccgggccactcgggcacgcagggcgctacgcagggccgcgcacacgcttttcggccacacgcgcacagccctccacgtggacgcgcgggtacacacgcccggggctcgtagccgcgcacacccgcacccaggaaaccccagccaccaccacgcggggtccgatcgcctctgagcaccctccgccccagccgcgcacccgctgcgcgcccgggacgcgcacactcgcgcacacaccggcccttcctgcgcacgtcccgggcccacccccgcctagagccctcggggtttccccccaccccggcctcggggtctctccacgtctccccgccgacgtgctcacctgctcagggggcgcccccgagccgcgccccgcgcccgcccccaggagggcctccgcgagccggctgcacaccccgaggcggtcccggctgcacaacttggagcgagttgctccgtttcctcattttgggggcgaagaagggtcggggagtgggggaaagcgggaggcgccgcggcctgggaggcccccgcgggtcctagcgccggccgcactgcggtctcctccgcgcgccgccgccgccgccggcccctccccgccccgcctccgcggcccccggcgcctcccgcgcgccccgggcggggtcccggggcgcacgcgggctccacgcctggccctgacctggccctgtcgggcgtgcaccccccacccaccctgggaagcggggttcttggagcgtggaacgggcgccgccagtgcgcgcggcggggaccgggggtgagggagagtgagctgcccgtccggggagataagcaaggcgccaagcccggactcccagaggacacttcgtactctgcaattccaactccctcagtgtcgcccatttgagcacccaccgtctcagagggctattggtggttgacaaaaaaaaagctttcaaaatgtcagccgctatcaatatcattatcataatcatcaacattaagggaaaattggagtaacagaatcatcgggaactgtaatcatccggatgcaaacttcttagagctgccctccttggagggtaaaaggggggcctgggagttggagggacctggctctgcccgtaggtaggaggtaccccttttccagccgggatttcctcccccatatggagggtgggggccccacccgctttcacctcacagaacagtttgatctcacttggtcttggtggacagggccctggcccccagcgatggctttgtggttggggtgaccaaaacgcccaatctgctttcacccaatgcaggcctttatctttatttttattcatttattttttgagacagggtctcactctatcccctgggctggagtgcagtggcgtgatcatagctcactacagccttgaccacctgggctcaagccagcctcccgcctcagcctcccgtgtagctgggaccacagggtaattttttttttcccaaattttcatagagccatagaaggggtagcctcaggagggggtgagttccctgtcctgggaggaatccaagaattggccactttgcctttttttttttttgagatggagtcttgctctgttacccgggctggagtgcagtggcgctatcttggctcactgcaacctccacctcccgggttcaagcaattctccttcctcaccctcctgagtagctgggattacaggtgcgtgccaccacgccctgctaacttttgtatttttatttttatttttttgagatgaagtctcactttgttgcccaggctggtcttggactcctgggatcaagcgatcctcccatttcggcctcccaaagtgctgggattacaggcgtgagccaccacgccttgcaccttatcatcctttctaagggatgagtcctctgaaacaaagatgaagttcatcttaggagggcaatgaaccgagatgcccaggtggcctgcgcccatatttaatcttctgttaccccaaaaggctgtgtgtctggacttgggggcatcacatgattttgcggggagcagaggcccagttacaagagaattacagaacagctatattaaggaacattatgcagcagactaggaaactatattattattattatcattattagagctgggggtctctctgtgttgcccaggctggcctcaaatgcctgggctcaagcgaacctcctgcctcagcctcctgagtagctgggactacacgtgcacaccatggtgcctggttaaaccatactattatatatattatattattaatatttatattatattatattatattatattatattatattatattatattatatacctggggcatccaggatgctctctcatctcaatagcatcaacttaatcccatctgtaggctgggcccagtggctcacgcctgtaatcccagcactttgggaggccaaggcgggcagatcacctgaggtcaggagttctagaccagcctagccaacgtggtgataccccgtctctactaaaactacaaaaattagctgggcgtggtggcacatgcctgtaatcccagcactttgggaggccgaggcgggtggatcacgaggtcaggagttcgagaccagcctggccaagatggtgaaaccctgtctactaaaaatacaaaaattagtctggtgtggtggtggatgcctgtaatcccagctactcgggaggccaaggtagagaattgcttgaacctgggaggcggaggttgcagagagccaagatcgcgccactgcaccccagcctgggcaacagagtgagactctgtctccaaaaaaaaaaaaaaaaaaaaaaatagagatgggatctggctatgttgcccaggctggtctcaaatttctgcactcaaacgatcctccaaccttggcctcccaaagtgctgggattccagatatgagccactgcactatctcagctcactgcaacctctgcctcctggattcaagcaattctcctgtttcagcctcctgagtagctgggattacaggcacatgccaccacacccagctaatttttgtacttttagtagaaacagggtttcaccatattggtcagctggtttcaaactcctgacctcaggtgatctaccaatgttggcctcccaaagtgctgggattataggcgtgagccacggcgcatggtttaccggcctcaactttctttcatggggttgtaatttactattagaagatcttctgggaggatgcccgtgtctacaattttagcacccacagcttcgtggatctggctgtgggatagtctggggtgtggctccccagaaagggctggggacgctgcagctgtccttctgtcacagtcactgcgggcccaccatatatggcaaaccaccatcacttgcctgaactagaagtgttaagtcaaaatatctgcagcggaaaacccagccgcctaatttgattctcaccagaagctgctgctgaccacgggtccctcgccgaggtctgccttctcttcgttcagcagggaaatgtccctgcatgagagggacatttaagatgctctagcaccccatgaagactttctcctcttcctctctctgcaaatcaatgatattagtgtcagtcctcccgaggagccccagggctccgggcaggaggcctcaccccagaagaaataataaggggaaccaaggtcttgagcccagagaagggcggacttaaggagctggtgttgggttcgcaaattgtcaagggctggctggggcagggagctcccctgactgggtggagacatagacactgagctgtgcctgactctagggggatagatttgagcctgcggtttatttgaatcagagccacagaaggggtagcctcaggagggggtgaggcatccaagaattggcaactttgctttttttttttttttttttttgagatggagtcttgctctgttacccgggctagagtgcagtggcctgatctcggctcactgcaacctccatctcccaggttcaagcgattctccttcctcagcctcctgagtagctgggattacaggtgcgtgccaccacgccctgctaacttttgtatttgtatttgtatttttttgagatagggtctcactcctgtcacgcaggctggagtgcagtggcgcgatctcagctcactgcaacctccatctcccgggttcaagtgattcgccttcctcagcctcctgagtagctgggattacaggtgcccgccaccatgcccagctaatttttgtatttttagtagagacagggtttcgccatgttggccaggctggcctggaactcctgacctcctgaccaagaattagccactttgaatcacaaagactctagggctctttcaggccccagaggtggccgcaccagtttctaatgcttcctgccaaggagctgggggactcaccccttccttataccagcctgagtgggtagactggacacccagattcccccagtcctgaactccccaccctccacctctcatccttggtgaccccctgtcaacttgatttcagaagttctctgatctgcaggtcaccctcctggtgcaggctggtgacagagcagtcccctttctggcgtcctggctgcctccaggttttcacctttcactgcaaagccaagggaaagaaacgtgactgtgtcctccctcactctaaatccttccatagctccccactgcctgcaggagagagcctaaaatgctcagcctggcatccagggctcttcatgtttggcctccagctgatctcccaggtcccattttctcctcctccctccaagaacctaatattctagtgagtccgaactgcagaagtttccacgcctttgcactggctgttccctctcccctggaatgcccttccccgccgtgtccagctggcctctccaagctcactctcccacacacaactcatgtggcaccatttggggaaagccttcctcaaggacatccccatacttcctagagcaaggtctccctgaaagggccccttgctagaggcactagctctcttgtctcactgtgtgataggtgtgagcctggccgtctctccttggtcttggtgactgagcccattagcctgcctgagaaggaggccagcctggaggaaacagagccaagaagcagggagagacactgaatcccaagggaaagactggttccgtatccttagaaccagcgatgcctggaattcacgtgacacctagttttagcagccagtctttcttttttgatttcttcccgagggggttctgctgcttacaatcaaagggattcttaatactcaaaatagtaccagaagtggggagttaaaattaacagactaatgtggaattgctgagtcaaattagattccctgatcccagctgggaagagggatgcctcgagcttctctttccgagagtccataaacctgccttccattccctgagtcaggcggcaccaggcttctgtcctttgcaatgcagcagcccagtggacacagtcatctctccacctccccccacttttttttttttgaaacagagtattgctctgttccaagacgagtccagtggcacgatttcggctcactgcaaactctgcctcccgggtttaagtgattctcctgcctcagcctcccaagtagctgggattacaggtgcccaccaccatgcctggctaatttttgtatttttagtagagacggggtttcaccatgttggccaggctggtctcgaactcctgacctcaggcgatctgcccgcctcggcatcccaaagtattgggattacaggcgtgagccaccgcacccagcctccacctcctccccttcttgagtgtttttctatttctttcctatccaaatctcacagttcttcacatatcactctcctcccatagacccccctctggctgtcataatctgcctaacccactactctccaaattcctagagatcactgagaccagtcttctcatttgagaagtagaacagctgaggccaggcacggtggctcacacctgtaatcccagcactttgggaggccgaggtgggtggttcacctgaggtcaggagttcaagaccagcctggccaacatggcaaaaccccgtctctactaaaaatacaaaaattagctgggcgtggcggcgggtgcctataatcccaagtactcaggaggctgaggtaggagaatcgcttgaatccaggaggctgaggttgcagtgagccaagatcgcaccactatagaccagtctggcaacagagtgagactccatcttaaaaaaaaaaaaaaaagtgtaaagtggaacagctgagacccagagaggcaagactactcatccttgatcacacagctggctgggggctaaacctcaggcctgtagactcccctgattggattgcaaacttctctaaggcagggcacgattcttattcttctctacaaatactgttggaaatcatagtaggcaataaacatagtaggtgatgagtcatatgacagatactttacaaaatttatcagtcagggttgggattggctggctgggatggagaacttcaaacgctagaggcttgaaattgatagaaaggcatcgtgactgaggcaggcaatgctgggcagtgttagggactgggctcctgcctcttgttcagcctttttcagcacatgaatttccaactctttttttttttttttttttttgagatggagtctcgctctgtcacccaggctggagtgcagtggtgcgatctcagctcactgcaacctctgcctcctgggttcaagcgattctcctgcctcagcctcccgagtaggtggtattacaggtacctgccagccaccatgcccggctaatttttgtatttttagtagagatggggtttcaccatgttggccaggctggtcttgaactcctgacctcaggtgatccacccacctcggcctcccaaagtgctgggattacaggcgtgagccaccgtttccagcctcacaattgaactttctgaacctggaggacaggccggggtggggaggccactgcagccagacatggggacacctgagccgccatggcctccatggaagccgtccccggcctagccgtcctcggctggaatctgcagttagatcacactgccccagttagcaaacctttaaatttagcttcctccccccagccaggggactccgggattgaggggaggaacgctggctctttcgaggaagaacgctgcatcactcattctgcaaccagtcgctgtctgcccggccattctcgattccttgaacgaagggcctcttggggcgagctgctttgggcgtctttgctggaaaacccttgccccgtcttcctcgtccttaagacgcagccggacaggttgttttccagccacacttgcaggtttcatccgtggaaactgggtctgtgtcacatccggccttaaaagcttcccggctgggcgtggtggctcacgcctgtaatcccagctctttgggaggccgaggctggtggatcatctgaggtcaggagttcgagaccagtctgaccaacatggtgaaatcccgtctctactaaaaaaatacaaaaattaggccaggtgcggtggctcatgcctataatcccagcactttgggaggctgaggagggtggatcacgaggtcaggagatcgagatcattctggctaacatggtgaaaccccgtctctactaaaaatataaaaattagccaggtgtggtggcgggtgcctgtagtcccagctactcgggaggctgaggcaggagaatggcgtgaacccgggaggcagagcttgcactgagcggagatcacgccactgcactccagcctgggcgacagagtggagactccatctcaagaaaaaaaaaaaaaattagctgggcgtggtggcatgtgcctataatcccagctactcgggaagctgaggcaggagaatcacttaaacctgggaggtggaggttgcaatgagctgagatcaggccactgcattccagcctgggtgatagagtgagactgtcaaaataaataaataaaaaataaataaaataaaagcttcccatggttcccactaagctcagtgtgcctcccggtgctttgtcacctctgcggtccagtggctgtcacctctctgctcccagcttctcccttgtctcccaaaagctcaggcatggggcagccacaggacctttgcacatgctcttcctatctcctagtactacatccttcccccagctcttctcaaggccagctacttctctgcactttcagcttctccaagagaccctccctggccaccccacagtggtcacccttagttactctctattgtcaaagccggaatccccacctgttatcctgtctcactcgtcattgtcaatctccctccatccttgcttcccacgacagaatatatcttcctaatgagggtaacgaccagccctgggcccggcaaccatttaggtctggagcctggcacataaaaggcccttacagaagcagatgagagggtaaagtctgaggaaggaggccaggcatgaaggctcacgcttgcaatcccagcactttgggaggctgaggtgggaggattgcttgagccctgccattggagaccagtctggccaacatagtgagaccctgtctctacaaaaaataaaataaactagctgggtgtggtggtgtatgcctgtagtcccagccactcaggaagctgaggcaggaggatcacttgagcccaggaggttgaggctgcagtcagctatgattatgctactgcactccagcctgggcaacagagcaagaccctgtctcaaaaaaagaaaagaaaagatcaagtaaggagaacaggagatacacattattccggaataaaccagtcatgtctactcaagagcagcccctaagtctctcctccaggatccctcttcatcctctcatgacctcatgctctaactcagggcccagcaaactgtctctctaaagggcatgctggtctctgtcccaactactcagctctgccatttcagggacaccatagataacacagaagccaaagaccgtggctgcattccaataaaactttatttatggacatggacatttgactttcatattacttttcttttcttttgcttttttttttttttttttttgagctggagtctcgctctgttgcccaggctggagtgcagtggcgtgatcttggctcactgcacgctccacctcccaggttcacaccattgtcctgcctcagtctcccatgtagctgggactacaggcgcccgccaccacacccgcctaattttttgcatttttagtagagaagggatttcatcgtgttagccaggatggtctcgatctcctgacctcgtgatccgcccacctcggcctcccaaagtgctaggattatgggcgtgagccaccaagcctggccttttttttttttttgagacagagtctcactctgttacccaggctggaatgcattaacgtgatctcggctcactgcaacttctgcctcctgggttcaagcaattctcatgtctcaacctcccaagtagctgggattacaggcatgtgccaccacacccggctaatttttgtattttagtagagatgggtttcatgttggccaggctggtcttgaactcctgaccttagatgatctgcccactttggcctcccaaagtgctgggattacagatatgagccaccatgcccggcctcatatgacttttcatatgtcatataatattgattccattttcctccaactatttacaaatgtaaaaaaacgattttagctggaggagttgtgcggatacagatggcaggttggacttggccctcagactgtagtttgctctccgctgccttctcacagtctttattttctcataagtaggtgcttttttttttttttttttttttttttttgagatggaatctcactgtttcgtccaggctggagtgcagaggcgtgatcttggctcactgcatcctccgcctcccaggttcaagctattctcctgcctcagcctcttgaatagctaggattacaggcacgcgccatcacgcctggctaatttttgtatttttagtagagatgaggtttcaccatgttggccaggctggtctcgaactcctgacctcaagtgatctgcttgcctcggcctcccaaagtgctgggattacacgtgtgagccaccagctgtatttttcaatctgttaaattaaatgtgctgatactcatggcatgtaataagctctcaagaagtgtttaaaaaaataaaactcaaaatatataaataaagctcctcaactcagcaatgagcctctcaagggtaagtatattcttgttggtatgaatagcagctgatatttatagggtgttttactgtgtgctgaagacaaagcaatataatgtcccactcctcaggggttgctgttgctgttttcaggtatttacctccatagttccaagtaatgtgttttacacatcccttgatttatcagttggatgttgtccattgacttcctattccagaaggtcaagatttagctctcttaggcattctgctcccccaacagttaaatcacaatttttgcttaaatgaaaattcagtgcttatagtatatatattaatataaatattattgacagtggagcaatgtatactaagaacattattttctgggacctgcttttttatttccctggagttagtcatcgccttggttttatgtgtctgtgactctttcccccagcctctccaccagaactgacatctccactcaggactttctcctactgcccagctgtgatcctggcccctctcttcttcggcacaaggggattcttagatatagctcctgtttcttgggtgtgggtctccctgtttcttggtttggtcccttgttttaggaatgtgctccccctagggtttccagagaaagtgttttcctcctactctcctgggtaattagaggtttggctgacagtattgtaggtggatacttttcttttgcccaatgttttccagcttctagtcttgggcagctgaatgatcagaagttgtcctgtttcctcatactttgcctgtcccatggttaatttctgtctctctctctctctttctggaagcttgtagaatcttcttgttccctacatcctgcactttcacagtggtgggtttggtgtgggtctgttttcaaccattgtgctgagtacttggtgggctctttcctgtgttctcttcctggcaaactttcttgaatgatatcattggtgatttcttccactttggtttctctggcgtgtttgtggaacacgttattgtcatagggtggacttcttggattgatgttttcattttcttgcctaccttcccccccacccccccactttctactttttcttccaacccttctattgacattttaattttgactattaatttttttttttttttgagacagggtctcactctgttgctcaggctggagtgcagtggtgcaatcacagcccactgcagcctcgacctcctgggctcaagtgatcctcctgcctcagcctcccaagtagctgggactacaggtgcctgccaccatgctggctaatttttttgatttttagtctcactatgtttcccaggctggtttcaaactcctgagctcaaacaatctgcctgcctcagcctcctggagtgttgggattacaggcatgcaccaccacacccagtgactgtcagagttttaatttccaagagctctttctggttcttttaccgttcctctttaaaggacaaacttggctgtgtgtggtggctcacggagctcaggagtttgagaccagcctgggcaacatagtgagaccccaatctccaaataatatgtaaataaataaaagaatttcttggcccagtgcagtggctcacacctgtaatcccagcactttaggagtctgaggctgatgggtcaccagaggtcaggagttcgagaccaggctggccaacatggtgaaaccccatctctactaaatatacaaaaattagccgggcatggtggctcatgcctataatcccagctacttgggaggctaaaggaggagaatcgcttgaacctgggaggtgaagtttgcagtgagccaagaacacatcactgtactccagcctgggtgacagagggagactccatctcaaaaaataaaaaataaaaataaataataaataaataagtaaataaataaaggcaaacttatacttgtttcctggctgttatatcctctatgagctctccgaggataagatgcatacaggttttgtttttttctgttctgtgtttgaatcaggaacataaggatttttctagaactgttttcttctgccctctttgtctctccttcaggttacttttcttttctctttgtgggttttggtctctctgttgactaacaattatgatggagtgctacagagctgacggaagcctcctcaccacagggcggcctcactgtggggtggttggcgggtgggggtgggggtcactgggcaggaatcccgaaacattggcagcatctggaaggcttttctcatagcctggcatccagcgttctagaagccacaagaggttagacatctggggttgtgactttaatggcctggattttttattttttttatttttttgagacagagttttgctcttattgcccaggctggagtgcaatggcacagtgtcagttcactgcaatctctgcttcccaggttcaagtgattctcctgcctcagcctcccaaggctgggattacaggcatgtgccaccaagcctggctaattttttttttttttggtagagacgggatttcaccatgttggtcaggctggtcctgaactcctgacctcaggtgatgcacctgcctcagcctcccaaagtgctgggattacaggcgtgagccaccgtgcccggcctgttttttttttaaggcagggtctcactctgtcgtacaggatggagtgcagtggcgtgatcataggtcactgcagcctcaacctccagggctcaagtgatcctcctgcctcagcctctcaagtagctgggactataggcatgcatcatcatacctggctatttttttttttttttcagagatggggtcttggtatgttgcccaggctggtctcaaactcctgggctcaagtgatcctcccgccttagtctcccaaagtgctgggattacaagcatgagccactgcacttggccttaatagcccatttgcacagcccctcatccctgccctccatggcgcctgggtccctgtgcctgaacctttctgtgcagcaagcattttaaaatgcattttcttactgaattctcctcacagctctctgcacagttggggactaccagtttgaccccaattttatggaagcttaaggcggtaacatgagctgtccccacactccatagctgataagttaaagggccacgctgtgactagagcccagagtcaccctcactgcgtgaagtgacggcttctggctcatccttgggtgtcccaaggaaggcagtgagtgtttgctgattgtctatggaataaatgtcaacatcctcaatgggagaaatagggaaaccacatgaatgaaggcccagcacacatcacaggtgttcaacacacagacggaattaatgagcaactgaaagaacaggagttgaggccgggtgtggtggctcacgcctgtaatcccagcactttgggaggctgaggcaggtggatcacctggggtcaggagttcgagaccagtctgggcaacgcagtgaaaccccatctctgctaaaatacaaaaaaattagctgggtgtggtggtgggcgcctgtggtcccagctacttgggaggctgaggcaggagaatcacttgaacccaggaggcagaggttgcagtgagctgagatcacaccattgcacttgagcctgggtgacagagcgagaccttgtctcaaagaaaaataagatgtgtcagccgggcgcggtggctcacgcctgtaatcccagcactttgggaggctgaggcgggaggatcacgaggtcaagagatcgagaccatcctggctgacacggtgaaaccccgtctctactaaaaatacaaaaaattagctgggtgtggttgcaggcgcctgtagtcccagctactcgggaggctgaggcaggagaatggcgtgaacccgggaggcggagcctgcagtgagccgagattgtgccactgcgctccagcctgggcaacagagcgagactccgtctcaaaaaaaaaaaaaagaaaaaaaggaaaaaagaaaaataaaatgtgtcttgtagggtcatgagaagaattaaattagataataagcacacagtaaataggtgatgaatcaatgtcgttataataccaagtgaagaaaagcaggaagcaagatggtaaaaatgacccacccataaacaacagggcattaaagaatagagagcaggatggccgggcgtggtggctcagccctgtagtcccagcactttgggaggccaagcactttgggaggccgaggagggcgaatcatctgaggtcaggagtttgagaccagcctgaccaacgtggtgaaaccccatctctactaaaaatgcaaaaattagctgggcgtggtggcaggtgcctgtaatcccagctactcaggaggctgaggcaggagaatcgcctgaacccaggaggcggaggttgtggtgagccgagattgcgccactgcactccagcctgggcaacgggagcaaaactccgtcttcagaaaaaaaaaggaaaagaaagcagaagggaaatggagtgttcacagtagctgataattttgtggttgttttgtgattgttttgttttccttcttccatttttctggattgtccaagtttttcataatgggaaaaacccaattcatgagtaaaaacatttatgtggaaaaacacatgtaacaaaatttgccatcttaatcattttttatttttatttatttatgtatttttgagacagagtgtcgctctgtcatccacgctggagtgcagtggcgcaatctcggctcactacaaccttggtctccaggttcaagcgattctcctgcctcagcctcctgagtagctgggattacaggtgcccaccaccacgcccggctgatttttgtatttttagtacagacggggtttcgaactcctgacctcaagtaatccgcccgcctcggcctctcaaagtgttgggatgacaggcgtgagccaccgcgcccggccgatgcttcctaatgcatttcgtttgcaaaatttgggagtgaccgttttctacccagaggtggcttctccaccttaaccaggaaagcgggtcttaatccgatcacctgagacaccttctcagtcccagaagctaaactagggaggcatcccgggacaagacgggcaacaatcttttcccaaacgacccccgagcctggccagggagatgctgcctgcaaggctgactgtgactgggccgggggactcagggcatcttagcggccgcctctcgctcctgtccgtgaccttgcagatgcaggtgacagcctgcccttccgtttttgtctttccagtcccgcctgccggattgggttccagccctgcccacacgcccggtacatcccgcctacactcaccgatgtcgcctagcaacccggctcgcagctagcatccgcaaccgaggtccccgcgctccagttctctggcggggagggagaggggtgttgcttctccagccccctgcagcctggtgtcttcctgccacccgccggcctgctccgggaaccgcggcctggtgggacgagggttgcggaggacgggtcaggagcgaccgcgtttcaggcccgtggactccgcagcccagacggtccatccatctgcaccgaatcccttcgctaaccaactgcttgattttgctgtcgcgccgcctaaacttggttttttggagttgctaggagggccgacttaactctttgtcagccgggctggttttcacccacctggtggcaggaatcctgtttgccttccccgggagccagggatgggaacgggaactgtgggtgggaggcttccgagagccgcctctcccggggcataaggaaggaagcggggctgcaggtaccgcctggggttcacagcaggggacgaggtgcctcccaccaggggctgctgtgatcgccaggcctgccagggtgtgccccttcccctgtcccttccctctgtccccacagccttggctggagtccctcaccggtaacgagacagagacaaatggtgttctctgtctttctgagacagagttttgctcctgttgcccaggctggagtgcaatggcgtgatctcagttcaccacaacttctgcctcccgggttcaagcgattctcctgcctcagccttccaagtagctgggattacaggtgcccgccaccacacccaactaatttttggtatttttagtagagacagggtttcaccacgtgggccaggctggtctcgaactcctgacctcaagtgatccgctcgccttggcctcccaaagtgctgggattacaggcacatgccactgcacccggccgacaaatggtattctcataaccaccagaaagagacacgtcctctggtgtcagagcgtggctctgagcactgagaccgactcagttgctagcgtccacctggcctgcccgagatctgggaatacagtggtgatccaattgatggtgagaggcttcctgacaggcagagagttcacattctcaaggggaagacagataccaaatcgtttcaaagatgcatggtttaaagtcaaggaataggccaggcgcggtggctcacgcctataatcccagcactttgggaggctgaggtgggcggatcacctgaggtcaggagtttgagaccagcctggccaacatggtgaaaccccgtctctactaaaaatacaaaaaattagctgggcgtggtgatgtaggcctgtagtcccagctactcgggtggctgaggtggaataatcactggaactcaggaggcgaggttgcagtgagctgagatcgagctgctgcactccagcctgggagacagagaccctgtctcaaaaaaaaaaaaaaaaaaaaaaggtggaactggaattgacaagacatcctcatggattggccgggagcacagaggaatccaggaggcctccctggttgtgctggctgtcaccttgagccctgggcaaatggcggtgctgctgccgcgatgctgacggagagaggggctgtgtgtggacggagtgtgtagcaagggagtgaagttcccaagaaatctgggatagagtggaaagcaggagagagggtgtgaggtggaggaggacggtggcctagaggccgcctgccctccggggaggcttaaccagcaattcctgttgctgacagataatccctgctagaaggggacccctcggtggctccccacccccctcctttggcctgggcctgaaacagcggtccctgcacacccagcccctgccactcccgtcccgccgcccccaccctgcatctgcctcctcccccaccctgcatctgcctcctccccactctgctccccgcctgccccccgtcccaaacactgccagggaagccctgtgggctggaaactgtcacgaaactcttccactgtgaccaggtctcagcatctgaacaccctccgcccgccttctgagggtttgggaatgtggcgggggaagcactctgtgggcagaggcatctctcccaaactcagcgtagttgcctcctcctccaggaagccctcggggagcctccagagcatctcactgtgtgtctctaggatggggccaggggaaccctcaaggaccgaggcagagagctgggttatgggaggcgttgagatgaatgattctcagccggtgtgtctgtgttcccaggggacccttgtgaggggacagcctgaggatgcccacaccttggggagcagccactgagcagtgccagccccttgggcccctcccagtccacatttgggctgcagggtttctgggagacccccacccgggaccctgagaaggaggtgaagagcccagcatttggggtcacctgcaccccgcaggaaggacggcacggctcacacaaaagacaaatgatttcctttattccccctgcctcccaatttccaggtagctctacaaagacattcagacagagccacatgcaggctgtccttcaaacacagagaaacaaaactgagccactggctggagatcacatctgcccaaaggtggacttttctcattcaatgccactgggcagctggccaaagaaaaaaaaactgaccaagcggaaggtttgaacaggttggggtggggactcagaagggggtgcccccacatccatcagtgccaggaggcgcctgcccaccatggccagcatccacaagacggcggcccctccccgggtcccccaggcacgggtcccgggccctgctaccacaaggggggattggggaccccctgcctcagggccagccaaggcctacatcagggagagagggaggaaggaaggacggaagctcaaatccaggcctcagtgacacatggcagagtgggttttctctgtgaaaggcactcagtggtacagggctcggggcggggggtgggtgggggtgcctctgggctccgggtctgactgtccagcacagctgttcccgggggaggcccagccaggatcctcatcgcccgtcggcgtgtccacctggccctgtggctctccccacaggggacgagcctggctcaggccctgctgacatcctggctgtggaggtgggtggggggtctgtttggagcaggctgggctgggggcgtggggatgccggctgggagctcccctgggcttgtcctgcacatgtggtggggccccagaacagggcctgcccacgtgatttcaaatccatgccgcagccgcatccaaagaaagttttgtttgtttgtttgtttgtttgtttgtttctttgagacagggtctcgctctgtaacccaggctggagttcagtagcgcaatctcggctcgctgcagcctcgaactcctgggctcaagggatcctacggcctcagcctcccgagtagctgggactacaggcttgggccaccacaactggctaattttttgtagagatggggtgtcaccatattgcccagactgatcttaaaccgctgggctcaagcgatccaccaagcttggcctcccaaagtgctgggattataggtgtgagccaccatgcgcagcccagaggaagtattttaaaaccccttcctgtaccacgaggtgagtttagagccagcaagatgcccccgagtttagaatctgcttgctgtactgctggcccccctggctgtgggggatggggccctcgaggaaggggtgccactcccagggctggatggtgtcatttctgtaacaatttaagcacaaatgttaaaaaacatttcttttaagtgacaaagtcttcttctgttgcccaggctggagtgtcacggtgcaatcacagctcactgccctcctggcctcaaggctccggactcagcctcccaagtagctgggactacaggtgcacaccaccacgccaggctaattgttgtgttttttactagagacagggtttcaccatgttgaccaggccggtctcgaactcctgacctcaggcgatctgcccacctcggcctctcaaagtgctgggattacaggcgtgaatcaccgcgcctggccaccaaccatgccaagctgatttttaaaaatattttggagagatgggggtctcactctgttgtctgggctggccttgaactctcaggctcaagcaactcagcctcccaaagtgctgggattaaaggcatgagccacagtgcccggtctgaagcacaggtgttttaaaggaaacctacagagcgttactcaaaaggaaatgaccattgtccaacgtcggggatgaagcagccattggtcggcgcgcacacgtccaggagtgcagggatgcaaaggcccgcaggtgggggaggtaggcggctcacacgagcccctctccgccccgccggccccgcttcttctcccctgcgccctcctctccctcgccaggtccccgttgcctcttccggaagcgggcccccagccggtgtctgggcggcaggagatccatgcccaggaccttgtgggtctgccggaaggccagcattcgcagggcgtgctgcggggcacacacagcctgtcaggacccccgcccgctctgctccccgagtgctggggacacagaggggctggtgtctgtggccaccagcagatgggccaggcctatcctgtatccctcgagatagcccccggccccccgccgctttcttttttgagacacagtctcgctctgtcacccaggctggagtgcagtggcgcgatctcagctcattgcaaccaccgcctcccaggttcaagtgattctcctgcctcagcctcccaagtagctgggattacaggcgtgtgccaccacgcccagctaattttgtatttttagtagagacagggtttcaccatgttggccaggctggtctcgaactcctgaccttgtgatccgcccgcctcggcttcccaaagtgctgggatgacaggcgtgagccacccggcccggccgacaccgcttcttacgactgcggagcttgggtcactgcagggcctgaggaattttcgcgtggtgccggctgaccacaaggactgtcccaggaggcccccccgctccactgaccaccagctctttccgcctcactggagggaccccacatcctgcactgcaagccattccagtgatcccattcaaggcaaaattcagaaacgtcagacccgatgcggtttggttttggtgctgctaggagatttttcttataaacaaatttgcaaacaaggtaaccacaggtgagggctgggcaggcggagctgtcggccacggctgggcttctaggaccatggtcagtggtgtgggggaggacggtccctgccaatgagacctgaggtctgggcgtcattaacggtggtggctttggctctcagctgctggccccacgccaccatgccaggctggccctgtccctgtgcgtggtcctgccacccacgggccgccctcctgttcctgtacatctcagtgggagggagagaaggggaaacccaggccatttcggggaacactgcacagctgcaagccggagctggggcctgggtgtcacccttgccgtgacttgaccctcctacctgggcgctggcggtcacgtcttcccgctcttggagggtcatgggctcgagggcatctgtctggtctctctcgcagggatcctggagcccgggcccgtctttgtgacggggagtgggaacagcaaagaaggcgagaatgccctcgtgaaagacggtgacagggccgtccctcgacaccgtggggcctcaggggcccgtgcatggggctatacttgcagccgtggcacctctgaccctcaggcctctctcagcaggttcagggtctcacccgggcacatgggggagtcctcctggcccctcaaagcctgttgggctgccagcatctcctgggcgttgtgtgtgtgttcgtgcctgtgtgcacccatgcatatacacatacgctgacgtgtgtgtccatgcgtgcccatgtgcacgtgtgtgtccgtgtgtgcacgtgtgtgctcattggcgtatgtgcatgtgtgcctgtgtgtgcatgtgtgcccgtgtgtgcacccatgtcggtgtgtgcttgtgcatgcacccatgtgtgtccatgcatgcacggtgtgcccgtgtgtgtgtgcatgtgtgcctgtgcatgcatgtccatgtgtgtgcccatgcgtatgcatgtgcgcctgtgtgtgcaagcatgtccacgtgtgcctgtatgtgcactcattccatgtgtgtgcccgtgtgtgtgcatgcatgtgcctgtgtgtgtgcatgtgtgcccgtgtgcactcatgtatgtgtatatgcccatgtgtgcatgcatgtctgtgtgtgcatgcactcatgtctgtgtgtgcccgtgcgtgcttgtgtgcccgtgtgtgcaggtacatccatgtgtgcacctgtatgtgcactcatgtccttgtgtgcccgtgcgtgtgcgtgcatgtgtgcccgtgtgtgcaagtacatccatgtgtgcctgtatgtgtgctcatatccatatgtgtgcccgtgcgtatgtgtgcccgtgtgtgcaagtatgtccatgtgtgtgcctgtgcgtgtgcatgcacgtgcctgtgtatgtgcgtgtgtgcccgtgcgagtgcgtgcgtgtgcccgtgtgtgcaagtatgtgcgtgtgtgcgtgtgcatgcctacacgtgtgctttacatgatggcccaggcaatgggccgaaagcttcatgctcccttttcacttgctatcatcctatgtcactaaaaatgactcgaaaacacccttttccgtatctggccgccaccctctcacatgtgtgtcctggcgcgttctcttccctctgctggtgtagaacgcattgtgctgggcagctctgcgccctctgtcctctgagctcctggctgttccctctggataatctttggaggacaggcaccggggtggatttgtgccagagtggctctgtgccggggtggctctgtgccgccgccggtgggcgtggccaccagagaacataactgttgtctcctgggtgggggctgagccctcccttccgggacctgcgtgtctgtgccctgcgtgcagggtggtgtcctccatgaccgcggccctgtctgccttcctgctgggagcatgtgtgtgttgtgggccgcactcctgcctgggctggacacttcctctgtgtctgtgaccccagctctctgtgccatggccacgggccctggtctctgcgatttgccgcccacctcctgggccctccggcccagcgactgacctgtcaggagcgtccctgtggccacgcactccaggactcgcctgactgcatccccggggcccaggggcccagccgcactgctcacagccttctccaccagcagctccatggcctggtggggacagaagagcagttgctgtgttttgggcgcgcggcagcccctgcctgcccgggaggtcctggggtccctgggacaggaggcccccctcagctctttctctaactcccaccacccactgaacttccgccgaggagggctgcccgtggcagggctctgccacctcctggcacggccacaggctggtttctttcttttctgagagcggagtctcgctctattgcccaggctggagtgcagtggcacgatctcagctcactgcaacctctgcttccccggttcaagcgattctcctgcctcagcctcccatactggctggtttcttcacccctctgagcctcagtttccccggccggtccacagtgacatcacatgccagtgtcaggtgcactgtccaccacgtggggcccgcctcagctgaggggaaggagccaccctatcccaccacgtcccccctgtggccagttcccgagggcacgaggggacaggggcattgctggcctcccacagcactgtgtgggtgcctctacagtcacagcaggaaaacaggtctcagggaacacaggctttctccacgtcaggacagccgcacaccggtcacccagcacggaggctactgtgacctcctcccaggagaggagaggacgtttcccctaaacaatgagtgtgaaaggtccggcgcggtggctcatgcctgtaatcccagcactttgggaggctgaggcgggcagatcacttgaggtcaggagttcgagaccatcctggccaacatggcgaaaccccatctctactaaaaatacaaaaattagccaggcgtggtggtgcgtgcctgtaatcccagctactcgggaggctgaggcaggagaatcgcttgagcccaggaggcagaagttgcagtgagctaagatttcgccactgcactccagcctgggcaacaagagcgagactccatctcaaaaaaatgattttaaaaaaaagtaaaaaagagacttaatctctaccaaaccaaacagaacaaaacaaacaaacgcctctgtaccatgctgcattctggacactgggcagtgggtgggtgtggatgaggcacacaggcccagtgggagggaccacgggcaagacaccactccagcacgggatgggggacgccactccagcatgagatgggggacgcccgcagggcgggggggaggccgggtgtggatggctggcttgtggctggtggagaaggtgtggggactgggtgggttcccggggtctccgtggggagcgtgggcatggggcgtgctctgtgaaccttgtggtgaggggattctgtttcttctcttccctcccctttctaccaggatgggctggggggtggtgtttgagccacagggggtctcccctccagagcaggtgggtctgggctgggtcacccagaggccggtgtgcagccaggatggggagtccggcttccgcccctctgcctgggcccctctgccccggtgccacgaagtcgggcagacacctcacatttccctggccagtcccacatttgcatgtgaggttctgggttttgaatagtggcagtcaaatgaggctgtggagagggccgtctcccccgcaaggggacctcagggactcccacggcctctcctgagtactaggtctcccgccggctccttcgagggaaaaggtctgtctctcagcctgggcctgtcagggccatggaggcccttgggggtcccagtggagggccgggccgccaggcactgccttacccaggctggcagggccccccaggtgggcacacgccggcagaggtccctcaggaccctgatgacgatcacgcatggctgcaggccgctggctcgagccttcgggggagaagcacacggttagctttcaggggctcacgtggccacacggcatggcgccgggctctgtcgtgagcgtgaaccccagggaggataatagggagcctggcgggcctcgaaggtggcgggtggaaacagagtccactcccacatgagcccggtgccaccaggctgttgagtggccacgagacggcagcgtccccacccccagggcagcacccactccttccacacttcccgaccccatcagccaggagccagcgttggttgtcaagtcagcactcggccaggaagctgatggcaggcgtcccggtctgcgctgggagcccacggggctgaggcggccgcgccgggttgacctggtgcctctgagctacgttcctcaaagtcacccctctccccctgctccacccctgcccccctgacctgaaaccacctggcatgacggagggcggccagggactcgaggcacttcttggggctcaggacatcacctgcatcagcctgaggctcctccacaccttctagaagaaaaacctcgaggtgtgcggggaaggtgcctcgtcccgctctgctgccgacggggtgaggggctcagtttgggcccctcgacgcttttttttttttgagacacagtttcactgtgtcacccaggctggagtgcagtggcatgatcttggctcactgcaacctctgtctccggggttcaagtgattctcctgcctcagccttccaagtagctgggattacaggtgcccgccaccacatctggctaatttttgtatttttagtagagacggggtttccccatgttggccaggctggtcttgaactcttgacctcaggtgatcctcccacctcagcctcccaaagtgctgggattacaggcgtgagccaccgtgcccggtggggattttattttttacgtatttagagacagggtctcgctctgtggcccaggctggagtgcagtggtgtgactggagctcactgcaacctcgaactcctgggctcacgtgatcctcctgcctcagcctcctgagtagctgggactgcaggcgtgcaccaccacacccagctaatatttatttatttatttatttgtttgtttgtgttgagatggagtctcactctgttgcccaggctagaatgcagtggcgcaatcttggctcactgcaacctccgcctctcgggttcaagtgattttcctgcctcaacctcctgagtagctgggattaccggcgcacgccaccacgcccagctaatttttatatttttagtagagacagcgtttcaccgtgttggccaggctgatctcgaacccctcacctcaggtgatccgccggccttggcctcccaaagtgctaggattacaggcgtgagccaccgcgcctggccaaatttttttgttttttttataaatggggtctcactaccttgcccaggctggtctcgaatttctgggctcaagcaatcctcccacttggacctccaaaagtgctgggattagagaggtgggccgctgtgcccgacctaaaaagggagttttagaagctcacctccccaccacgctgggcctggggagaggaagcgggggcaggaaaaggccgacaggaagtgcactttcctggggggcggctcacggggctcttctgtcactgatctgtcctcacagaaggatttccgctcacttcatcacccacccgagccaggaaagagccactgtctagtggccgccaacccttaacccgcccccacaaccgcgccactccccagcctcctccgcatttgtgtcacagccttcagctagcgccaaaagccactctcttccccacactgtacttagtttttagatgactatttgtgaggactgatcgtgactttccatttaatgattcaaggctcttattaaaaaacaaaacaaaacacttaagctttaaaaaacaaattgggccaggcatggtggctcatgcctgtaatcccagcactttgggaggccgaggtgggtggatcacctgaagtcaggagttcgagaccaacctggccaacctggtaaaaccctgtctctactaaaaatacaaaaaaattaactgggtatagtggcgcacacctgtagtcccagctactcggaggctgaggcaggagaatcgcttgaacccaggcggcggaagttgcagtgagctgagattgcgccattgcactccagcctgggcaacagagcgagactctgtctcaaaaaacaaacaaacaaaaaataccaaatcgattgaaagagaaacatcagtaggtcatggccctcagttatgaccaaaaaagattacgaagggggtaaaagatgataggagtttggaaaactgccctagagactgttctggaagattccacagctggctgagacttcgggagcacagacgtgcagtgtgttactgatgcctgtcttcgctgtggccgctggccaagaccctcgctgcccctagcctggcccggcccctcacccaccctcccaggcctggcaggtctggctttaagacccccgattccctacattcctaatcagtggcactgggactgtggtgactgatggacagagtcaaactgagcttctgccgtgacccaggggaaatggctcagacctgtcctttgccgccagggctggtgtcaccagggcctgagaagcaggtgccagccctgggtaagggcaagggaggtgacacggtgtcgcttgcccgagcaaggcccctgcagccaggctctgagcccatctgatgctgtcaccgactcgccgcctctgctgcccggagacccagctcttgtgtgacccatggaatcctcagggggacagcagtgctggagcgtggctgctgtggcatttcctgctcagggcagaggcggacgctgccccaggcctgggtgtggggagcgccctggggaagcgtgagggggacagtggttggaaggaagggctgggccgcacctgggtctgtggaggggtcctcccgcatcagaggtgaggtgacagatatggtgacctgcatcctgggctcctcacaggaggagatgacaatgttggcttcagggtcggaggagacctcatactcatcctcggtcaccatctgggaggggtaaatacaacacaaggccaccttactgcagcccagattcatgtgtaaatcagccaggatgtggttggtgtgtgtaaattaatcccgtcgggcctcccacacttgctgcctgggtgccgggccctgtgccctgtgtctggaacctccaagtgaccaagacacagccgcagccctccaggagtgcacacatgtagagatatgtacagacaacagatcatgtgatgcaaggagcctccatatgtaaagaatacctgtaattcaataacaagaagaccagcaatccaataaaaaaattggtgagtgaaataacagatacctggcagaaaaagaaacacaaatggccctttttacacagtgacacacattaccccatagtcagggaggagtaaactaaaaccataatgagacgccaccatctcctgtgagcaggacatagctcaagaggtctgtgtcacagtctggtcttcctgtccatggtcatcaccctccatgaggcctgtgctcacacctgagcctggcctcccacctgaaacgcacctctctccccatcctccatcccttcccttctcagggcctccctgctgcaaggcagcccccagggggctccgttgacattactggggtggatgttgtcagcttccccacagccttatacattctcatggggctcagttattgtctttgccaccaggctgcaagttttccagaaagcaggggctgtatctatcatgttgtggccactgtcatgttgtaggtgtgcaggaaatgtgagatgcaattattgaagtcagagcatgtcactcccctgctcaaaaccctccagcctccccacttccctaagaatgcaatcctacctcctggtacggccttcaggcctggcttgatctaggtgccccctcattccctcgtgcccacccctccttgctctgggcctcctgctttttggcctctgcaggtgctggtcattctatggggaacactgtctccccgaccaggcactgcccatccactgggcatccagtgcccactggaaaagtcaaaggagtaaggctgagttttcccagggatggtgacagacgctcaggaagaaggaacgactctggggactgatttttcatttttctttctttctttttttttaagacagagtcttactctgtggcccaggctagagtgcagtggcactatctctgctcactgcaacctctgcctccagggctcaaatggttcccctccctcagcctcctgagtagctgggattacaggcgcccaccaccatgcccggctaatttttgtatttttagtacagatggggttttactatgatggccaagctggtctcgaactccggacctcaggtgatccacctgccttggcctcccaaagtgttgggattacaggcatgagccaccacgccaggcccgatttttctttttaaacctaagatgatcaatgtaaattcttcagtatgagaagagtatatgaaaattctctagaggaaaaaaattcagttgacatttcacagccctaaaattgaaattgggtttttgcttttcttacggcttcctagtcgccattgctgcgaatgttttctgtgcagctttcatcatcatttactctttttgaatttcttttgagactgagttttgctctgttgcccgggctggagtgcagtagtgaatcacagctcactgaagcctcgaactcttgggctcaagggattctcccgcttcagctccctgagtagctgggaccacaggtacatgccgccatgctcagctaattttttttttttttttttttagacggagtctcgctctgtcgcccaggctggagtgcagtggcgcgatctcggctcactgcaacctctgcctcccgggttcatgccattctcctgcctcagcctcccgagtagctgagactacaggcgcccgccaccacgcctggctaattttttttttgtatttttagtagagacggggtttcaccgtgttagccaggatggtctcgatctgctgacctcgtgatctgcccatctcagcctcccaaagtgctgggattacaggtgtgagccaccccggctggcccatgctcagctaatttttaagttttttgcagatacaggttctcactatgttgcccaggctggtctcaaactcctggactcgagtgatcctcctgcctcagcctctcaaagtgctgggatttcaggtgtgagccaccatgcctggctaacaaactggttggtttctaacagcgatgcttcttcttgtatcttttttttttttttttttttgagacccagtctcgctctgtcgcccaggctggagggcagcagtgcaatctcagctcagtgcaacctctgcctccgggatttaagtgattctcccacttcagcctcccacatagctggaattacaggcacatgtcaccaggcctggctaatttctgtatttttagtagagacggtgtttcaccatgttggccaggctggtttcaaactcctgacctcaagcgatccacctgcctcagcctccctaagtgctgggattacggacgtgagccactgcgcctggcttaatgcttcttgtaccttaaagttgtgtagtaacaaaggtcccctgccatctaggagcgcaaggggctgcggggagagggctggcagccagacgccagaagcagcgatgagcagggccctgaccttacctggagctgccggggcagctgctgggcgatcctccgcagcaggctgtgcgtgggcttctcggagcagagcagagcgaggcgcacgttcctgtccccacgcaggaggaggcctttcgccaggatgcctactcgcatgacgcctttcaggacccgagtctggggggcaacgctgctgtggggacaaagccacagacgtgcgccatcagcggagagacgcggggtaccccagctgcctccctcctgagctacggggaccctgcaagttacagagcctctctgtgcctcggcatcctcatccatgaaatgggaccaggccgctctgtcggaggcgcttgcgggatgaaatgagacaccgtgagatcgatctcggaggtgctgtcaccgggcatgcctcggagtagccgggacgcgtggccaaacccacattttccttccttgtgagcaaacgctaagccccaggcccgccccgcgaggtctggtggctcccgcgttcacggactctgtcaccctgttgtttcggctccacatgggttccagagaggacagaaagcaaggctgctttctgctcttgcttcacgggggttaagaaaattcacaaacctaggccgggcgcagtggctcacgcctgtaatcccagcactttgggaggccgaggtgggcagatcacttgaggtcaggagtttgagaccagcctgaccaacatggcgaaaacccatctctaataaaaatataagaattagccaggcatggtggcgggtgcctgtaatctcagctacttgggaggctgaggcaggagaatcgcttgaacccaggagatggaggttgcagtgagccgagattgtgtcactgaactccagtttgggagacagagcaagactccatctcaaaataatgataataataataataataataataataataataataataattagctgggtgtggtggtacattcctgtagttccagtacttggaaggctgaggcaggagaatcacttgaacctgggaggcagaggttgctgtgagccgagatcgcaccactgcactccagcctgggcaacagagcaagactcagtctcaaaaaagaaaaaaaaaaaaaaaaaaggagagggcagcttcctgggcgctccttgtattgggacactttgcaacccacaggtgcaaggctcacatttcctatatggagctctgtgctccagcaaaaggaagccctcaggccaagtggatcagccagacacaaaaggccacacggtgtgcgaccccatttctatgaactgtccagcacaggccaatccacagagacagggcgggcacgcatgggtgcacgaaacaaaaagaggagtttgcttaattgggacagagcttctgtttgggaagatgagacagctgtggagatggacaggggtgtagtttgcacgtgtgaacgtgcttcatgcccctgaactgtgcacttagacaggttaaaatgctcagtgttgtgtgatgtggattttaccacaatagagaagcattcaaagaggaaagtgaacccgtaatcccggcactttgggaggccgaggtgggaggatcgcttgagcccgggagttcaagaccagcctggctaacatagcgagacctctccctgctacaaagagttaacaattagctgggtgtggtggtgggcgcctgcagtcccagctactcgggaggctgaggcgggaggacagcttgagcccgggggtctgagggtcagtgagctctgatcgcgccattgccctccagcctgggtaacagagtgagatctgtttcttaaaaaacaaaacaaacaaaaaaacaacaacaacaaacagcagctgccagagcaggaaaggactttgaaaaaaggtaactcccgctcagatgagttatctccatggcaattacttagacgacgtggggactttctcacttcctaagaatcacaggggttgggagctgattcacacgggcactcagtgacatgaactactctgattactcagtcactccccaaggcggagaagtccgtcagaatcacgctcagcttttccttttgccaatgaggaaactgaggtttacagagactgtcagtcccttgtgaactatttttagatgcgccttcaatagcaaaagggaatgctaaggcattagaacagcacggatcacccgctgcaaaccagcctcgttcagtgccgagaagctccagctctgagacctggggaacttcctactcctggggctggaaagctgccgcgggccaccgacggctccaggcccatcagagctaggggttcctgcagggtctcgtcccgaggagctgacctctgtcctggctgagagccgggccctggggaaggggatctccaatgacctgcgcttgtcaccctcttcctctcggcggccccggtcctcctcggccagtgtgtcggacaccagcttgagggcccgctctgcgtgggacacggccctctgcacggccaggagctcctgctccgtggggtagatggtggcgtgcttgcacatgacgtgccggtcgtcgctggacgccggccgccgcccgggctgtggggagaggccgcacgtgtcaagggtggtctgtggggacccttggggagtgctgggcaggcgggcaggtgggggcaggtggccgtggccagccaggttacgaggcggcagcgtggccaggtgagaatccagtgcacacagagagccccggggtggggaacagggaagtacctcgggctgccccgatggctgcaggaagctcgggtctgagtgaaggaatggggggaaactccgccacctttggccatattcttaaatttccagaccagaggcttttgagtcagcctgggaaccctttctcacagcaaggtgcaaatccgaggttcccattgaggccgggcgcggtggctcacgcctgtaatcccagcacttagggaggccgaggcgggcggatcacctgaggtcaggagttccaggccagcctggccaacatggtgaaaccctgcctctactaaaaacacaagagagcccggcgtggtggcgggcgcccatagtcctggctactcaggaggctgaggcatgagaatcgcttaaaccctggaggcagaggttgcagtgaggccacgattgcaccgctacactccagcctgggcgacagagtgagactctgtctcaaaaaaaaatagttcccatcgaacctgggggctcgggctgcggggacaggtgcttctgagaagagacagtagtagccacagaggcatgaggctccccaagggaggcgaccacccggggctccaggaagcagaagggatctctgtggccagtggcaggggctggggtgctggggctcccatctgtggagtgaggaggcctgggccatggagccccatcccctgagtactatgtgggagttggggggaggccgggtcctcccgaggaggtgtccgctgctccggggagtgtgaggtcgcccgcgtttgcacacagaggaaactgtacctacctggagtggggcgctggcgggtgactccggcctgcccatgagcagaggctgggcccagtcgggcggcgcgtggggcggcacgtcctggggtggctcctcctccagccgcctgcaggaccgagacgtgacagagcatggtcaggccagcagtggccctaagctgggggcaagtcagaaacactggggccttatgctcccagcaaggaaggaagggccaaagctcttgctggggctccactgcactgcatgggtgcctgctgtatgcacagaagactgaggctgggaaggctggtgtggggggcagccaaagacaccccttaggcaaatgaggcccagcccgggcagccatggccttcaggaggtcctggttcccttcccaatgcagacctgctgctgctggacacaccagagtcagatgttacatcagaaaatgctctaggatggacacaggggacactgggaatgaggggacgctaggggatcagggggacacaggagactccaggggtcaaggggactcaggggataccaagggtaaggggacacagggtcatcaggggtcaggagacacaggaacaccaggggacagagggacaccaggggtcagggggactccaggggtcaggggtcacatggcacactagaggtcgggggacacagggacaccgggggtcgggggacacagggacactagaggtcgggggacacagggacactagaggtcgggggacacagggacaccgggggtcgggggacacagggacactagaggtcggtggacacagggacactagaggtcgggggacacagggacactagaggtcggggacacagggacaccgggggtcgggggacacaggtcacaaggcacctctgcagccgtgtggtccagcgagttggccggcagtgtccctgcgtctacggaggccctggagcccacgtgtcaggtccgcacgccactgtgcccttgcccgtctgctctggaaccctctcacgctcccacaccaggacgtgcccactgcccgggcacccgtctccccccactgctcgagagctcacacggaggagctccgtaatctgcagcagtgggcgtctaggttccacgctggacctgccctccctcaccaggcccccttgccaagacccgcagccgggcacctcctctccgcgtgccagcgccgcagctgctccagccgctcctccgccaggtgccgctgcttcctcatgcgctcctccaggaccttccgagcccggctgctgggctccgtggcaatgggaaggtccgggttcactttcttctggaaaggacaggcaaggctctgagagtagggaccttgctttagacagggatgccaggaggatcttggggtgcagggagaggcccagagactagaactgttgggctgaaaaatctcccaaagcctttttttttttttttttttttttttcgagacagagtcttgctcttgtctcccaggctggagtgcaatggtgtgacctcggctcactgcaacctccgcctcccgggttcaagcgattctcctgcctcagcctcccgagtagctgggattacaggtgcgcaccaccacacctggctaatttttgtatttttagtaaagatttcactatgttggccaggctggtctcgaactcctgacctcaaatgatccacccaacttggcctcccaaagtgctgggatgatagacgtgagacaccgcgcccggccgaagatacacttttgagacgaggaccaagacgttgaaaacccagaaaatcacccctccctcttaagttcgtcggatcacacgcgcggaagaggcccgaccacaggcctcccagcgcccgccgggccctagcacagcccggacgggtgtcggagctccccctgctggacgcacccggtactgcagccggtgccgccgccccctcacgtgcaggtccttcgcgttaaggtcgttgaaactgcactcgcacagcttgcagtggaagcgaagcactcgcccttcgtcgctgaacacctgagacacagaacagccgcacgcgcaccaggcacgaggcggggtgggatgtgagatgctaccgctgccaggtcgcggcggagccttcctccttgctgctcattttatttatgtatgtctttttagagacagcgtcttgctgtgtcacccaagctggagtggagtacagtggctcggtcttggctcactgcagcctcaaactcctgggctcaagcgatcctcccacctcagcctcccgagtagctgggaccacaggcacacgccaccatgggaggctggaggattgcttgagcccaagagttcaagaccagcctggtcaacatagcgagacccccatctctacaaaaaaaataaaaaatacaaaaattagctgggagtggtggctcatgcctgtagtcccagctactcaggagactgaggtgggaggattgattgagcccagaagtttgaggttgcagtgagccatgatggcaccactgtgctccagcctcggtgacacagcaagaccctttctcttaaaagaatcccaggcctacaggcaaggcagaggaaacccagccctgcctctttggcacgcacaaggccaaccggggtctgaactgccgctggcctgggagctggcagacctggcccaggagctcggctccactgctcaccagcctgaccttggcaggtcccagggtcccgcaggcccaggaaaggggctagacagaagggcttccaacctcccggggagctttctactgcccagatcccttccaccttccagacagacggctccgcagggtcccctgttgggaatgcctcggcctgtctctggccctcacggggccatattcatttcctgctgataccaaaatccggcacccaaagtgtcaagcgggtctgcacggggttttggtccatggaggtctggcctgtgcagctcaggaacggggatgggtctgtaaatctcgctgggagaagccgggtgaggtctcgaagcctgatccatgggaaggtccttccctgaccggggcaccaggacttgacagcctcgacttacctcctccacatattccgggcccaccggctgcgcatcagagcagcccgcgggagcttcctttgagcctccttgggtaggtgctccgggaccctctaatttaggttgggctggtttcccccactggggtctgcagcctgctgcctgtggctcaggaggccctgaggggaaaaaccatgtcacttataccctgttccaggagaaagcactgcagctgcagacccgccaggcggcatggggtggagagccacccagactgcaggctgtgccatccccctccctcctgtgatgtcagggggaatggccccggacagcaacctcgctctccctttcatgcctgcgtgtgacccagccaagaaaccgaggccaatttcaatccatccggggagaagccctggttttaggccctcgcttgaggaacccaccgacagcacaaaatccacagttaatagaccatgaagtatcaggcggaccaaggctcgcacttaacctacccccgttaggcgaaatgatggagcctcggggggagacaaatatctttgttataagaatgacttgatggtttgatcttcaaaatcatgttgctattcaagaatcaacgctgctgaggctaaaaatagaatgtggctccctcgacccctgcccacgcacagcacggtggtccagggcagagactcttagacagacccgggttccaattccacctccaccgtttacggcttttccatctacacattgggactggtgacaacattgactcaaatgagttgtgggctgggcacagtggctcatgcctgtaaacccagtgctgcgggaggccgagttgggaggatcgcttaagcctaggagtttccgaccagccccagcaacatagcagaaccccacctctacaaaaaaaaatacaaaaagtagtgggatgtggtggtgcacacctgtagtcccagttactcaggaggctgagctgggaggatcgcttgagcccaggaggtggaggctgcagtgagctatgattgcacctctgcactccagcccgggtgacacagtgagactctgtctcaaaaacaaaacaaaacaaaccacgaaaaaagagttgtcgtggaggtaaagcgaagcaatgcacacaaagcagtgagcagacgcctggcatgtaatcctagttaacgcgggtcagctctgacagctggggctttgcacgcagggaaggtagggtcacaggcagaggggtgtgaggattccaccttcatttcctggtacccatataactctgattctgagcccaatttgttcaccgtgagcaccagggcatgcaggggagcacagtggaggtggcagcccagggaaccctgtaggtgcagggtgagggcttccagagaaccccagcacccggcaccaggccagattctaccagaagaggccgggcgcagtggcttacgcctgtgatcccagcactttggaatgccgaggctggtggatcacttgaggtcaggagttcgagaccagcctggccaacatggtgaaaccctgtctctacgaaaaatacaaaaattagccgggcgtggtggtgcatgcctatagtcccagctactcaggaggctgaggcaggagaatcgcttgaacccaggaggcagaggttgcagtgagctgagatcgcaccactgcactccagcctggaggacagagcgaggctccatctcaaaccaaaacaaaacaaaaaaactctacaggaagaaatggcattaccattttattggttctgccagcactctctggaaatggtctcaaagggtctccaaggttcagggcggtgtgggccagtgggaggccatcttgctctgcaggaataagggagagacggcaccagccagcccctcaccaccccccgggaagacatgacgaaaatcgactggatggtagattttctcacgaaactttcactaggcggccagggctctggtgggtacacgaacacgcatacagacacacgtaccctcgcataaggccttcgaggccacgggtctcttggccagcgctggcctgctcgaggcacacacgctggggccagtgggggacgtgggcttggcctctgccccgggggggctctctgtggccagtgcaggctcgagggtgggaatgggcttccccagtttggcgtgcagcttgaagacctgcaacagacagagccgggctcccgcgtgagggccgctcccagcctgatggcctttttcaagaggcaggaagggcctccacgggcgtgcagcgcgagtgtgggctggccggtcccagggacccccctctcttctctcctcctgctctctggataacacccactccagaaggcccttcccaggtggcctcctgccttgcacacgtgcttgtgacttctctagcacggtgacactcctctagtgtgtgagcacgtggctcaccggctcacacggacgctcttcctcctcctccaccacgtgggctgccaggtggggccgtttctcagcctcccaagccccagcctagtgctccctgactgcccgggactcagcatgtgtggatggatggtgggtgtgcacgtgtccctggacggacacccacgttctgcacgcacgtgtgcacatggtcacgtccgtattctggccgtgccccattctcagcacctctaggtacaaggtgtttctggcaaaggttccgtgtgcacagggccactgtgtgtgtgctggggaccatctcagacacacttcccagctctgtctctgacacgctgtaccctggtacaagacctgccctgtaccccccaaccccacaacgggcagcagggcctgcctgacccccagactgagccccagcctgtgggggtgacacctgcagctctgccccaccggcccctagctctccggtccccaggccaagtctccttcccccgtttctctgccccgctccttccctcctccatgcctccctgctcattcctctttcccctgtgggttcacacgggccctcagcaagctgtcctgagccgagccagggaatgaggccctggatgagcctccaggcagctgggggagagaagccaggtcctcagccaggcctctcagggtggctcagcctgacagcccgggctacagcacaagccagctgtcccctccctgctctcaggtggggactccatcccctccccgccgaacatgacgaaacccaggcctcttttttttttcttttggcgacagagccttgctctgtcgcccaggctggagtgcggtggcgagatctcagctcactgcaacctccacctaccgggttcaagcaattctcctgccttagcctcctgagtagctgagattacaggcacgcacccaccacgcccggctaatttttgtatttttcagtagagacggggtttcaccatgttggccaggctggtctcaggctcccaacctcatgcgatccactcgcctcggcctcccaaagtgccgggattacaggcgtgaggcaccacgcccggcctgacccagaccttactaaggcctcaggagaacagtgatactacagcagggagtgtgaagagcaagacctcaaagggaacacagcattgggtctcatcacagggcaagccctgtctgtcaccacgcccgaatgccaagctttcttggaagtccgggtgtgagtgtctcggccacttcatgtttttgtgcaatgagcaggaaccctttttataagtggaaaggagtccccgcacggtggctcacgcctgtaatcccggcactttgggaggctgaggcgggcagatcacttgaggtcaggagttcgagaccagcctggccaacatggtgaaaccccgtctctactgaaaacacaaaaattagccgggtgcggtggcggatgcctgtgatcccagctactcaggaggctgaggcatgagaattgcttgaacccaggaggcagaggttgcagtgagccgagattgtgcccctgcatcccagcctggggaacaggacgagactttgtccccattaaaaaaaataataaaatgaaaactaaaataaaataactggaaaggagtttggatccttgaagatgaggacgcatgggcctgggcggctggcccttggggcgcgctccacttggggaggcttctcccagctccctctgatctccccaggtacctctgtgggtcccaagtgctgacctgggggccttctccccagggtggcagagcctgggccgggcggggccgtaccttctggtgcttggatccccggatgtgggccgcgtaggcgtccgccccggtgcaggacacggcgcacaggtcgcaatgcagctgcgcctgcaccccgcgcgggctcccgttgggctgcacgcctgtcttctgggccgcctccttctttctgtgcttctgccctcccagatgttcccggtaggtctgcggcaaggggtgagaggcagcctgggcgggggtttgcacactggccactgtcccctcccctgcaggcccccggcttagcgcgagggaactcggtggtaacagaggcccgctgtccccaaccctccattccctggtgccatggaggttccagtgtccctttatttttcttatttttattttttgagatggagtctcgctctgttgcccaggctggagtgcagtggcacgatctcagctcactgcaacctctgcctcctgggttcaagtgattctcccgcctcagcctcctaagtacctgggactacaggcgggtgccaccacacccggctaatttttgtatttttagtagagacggggtttcactctgttggccaagctggtctcgaactcctgacctcaagtatctacctgctttggcctcccaaagtgctgggatgacaggagcgcaccaccgcgcccagcctatcttcttactatagacgtctcaaattttttttttttttttcgagacagggtctcactctgtcacccaggctggagtgcagtggcgtgatctcagctcactgcaacctccacctcctgggttcaagcgattctcccgcctcagcctcccaagtagctgggactacaggtgcacaccaccacgcgtagctaattcaagtgtccctttatgaagcccacgtaacaaacccacaggctcagactgctagacataaggtttcttccttcttctggaattcaaggagtttctttggaaagcatgctccatgcatcacacattccttttgggggctgctgtatacagaaaattctgacttcagaattcaacgtcagaaaccaagcaagggcacctgctgcccgaaggatagtcacgtacacttccatcttaggaaactgctaatagacacaggggctccacccgggggaagccaccgtgagtcacaggcctacgcatccggtactactgggcccaaaatatctgattgcgtctggggaagcgacagccaagcccttaggcagaatcctgggtgtgctgcttgaaatcctcaaatgaagccggccacagacaagacgtggcaggagggccacgaaaccaacacgccctgacaatgccaagaataaacattctgcagactgaaaaatgcccctgaaaatactggggcacagtgggcactgccccgtcacctgcaggccaccggcttggcacacaagaactcagagacattgtctggttttagggaagaaaaataggacgtgggagaggcatacattttactgtatgcatgctctctggaacttaggaatctttttttttttttttttaagacggagtcttgctctgttgcccaggctggagtgcagtggcgcgatctcagctcactgcagccgccgcctcccaggttcacgccattctcctgcctcagcctcccaagtagctgggactacaggcgtctgccaccacgcctggctaatttttgtatttttagtagagacggggtttcaccatgttggccaggctggtgttgaactcctgacctcaggcgatcctcccacctcagcctcccaaagtgctgggattacaggtgtgagctaccacgcccagcctggaatttagcagtcttgaacctcataaatatattacctaagcaatagaataaatacgcatccctgtgcacacatactaacttagaaagagagactgcctgtggaatagagaagactctggaaggatacacaccaagatgctaccgctaaatcatttcagggtggagggattatgggggactataggtaggtttgtgtgtgtgtgtgtgtgtgtgtgtgttttgttgttgttgttgttgttggtttttggggggttttgtttttttgtggacaaagggtctcgccctgtcgcccaggctggggtgcagtagcgtgatcatagctcactgcagccttggactcctgggctcaaacgatcctcccacctcagccttcaaagtggccaggactataggtgcgtaccaccatgcccagctaatttttaaattttttttagagacagggtttcacccatgttgcccaggctggtctcgaactcctgggctcaagcgatctaccggcttcggcctcccaaggtgctgggattacaggcatgaggcactgcacccagccagtaggctgtctttgtgcacttttggcgtatactgcagtaattagccacgtgggcttcaacacatcttggtttgatttctgcctgggtcactaaaactgactctgagttcctcaaagtactgaccctttctgagcctctgggattttatctgccacacagagatggtagccacaaggcagatataaggattaaataacccacacgggcctggcgcagggactcagcttgtcatcctggcactatgggaggctgaggcagaagaattccttgagcttaggagttcgagaccagcctgggcaacatagtgagaccctgtatctacaaaaaaatttttttttaaatagccaggcatggtggtgtgcacctgtaatcccagctactcaggaggctgaggtaggaggatcgcttgggcccaggagttcgagactggacctgggcgacatagtgagaccccatctctattgaaaatttaaaaaattagctgggcatggtggttcgtacctgtctcagctacttggaaggctgaggggaggatcacttgaacccaggaggtggaggctgtagcgagctgtgattgtaccactgcaccctagcctgagcaacagagcgagactttgtctccaaaagaaactcaaacttctatgcgagcactctgcaaagaaggccggggtctctcccagcatgagacacagtggagagctgctggaggaaagagtctgagacagggaaagggtgatctggggcgggaggggtcctgagcagggaccggccccccatccccagctgggtcaggggtcctgataacggtgtcctgagccttctcacacctctccagagtctgcgattgcagactccgtgtctctccgcggtccagagcttcctttcagagtattaaaaacaaaagaagatcagggtgtgtgttttgcaaagacagagctctagggtctaattatctttccaggaattgagcccacgatctcagctgggtgatttgcaagctttaaaatctcaagctcgtgtgtttggtaaagattctttcacgtatgtcccaaacaagcactgccaagcacaagcacgcatgcacacacacacacgggcgcatgcacacacatacacatgcaggcatacatgcgcacacatacacacacgcacacacatgcacacacatacacacacgcttgcacacacaggcacatgcaggcacacatgcgcacacatacgtgcaagcacacatacatgcacactcacgtttgcacacacatatgcacacatatacacatgcataaacacacgcacacatacacactcacacttgcacacacacacaagcgcttgcacacacaggccatgcatacaacatgcaagttaacaccagaccttctttcagcaggcagcgaccctgaccaccccaccggcgcccacattcgggttcagacgttggggacagagaggtccctggggcctgcccatggcaggagggcgactgacctgggggccagcgcagctgatcttgcagatgtcgcagtagtgaagctggagctgcctgggccccgccttgggtctcggcagcttgctgggaagcggtggcttcgagtcggccctggggctgcttcctgagcctgcaggcgcgggcggcgggggcagctgctgcgggggtcccgggggaggcgggggctgcgctggaggatagaaagggctggcagcggagtacaccgacgcgtcatagttcgggtagcttggtgctgagcagcagagaaaacaatgagtcggggggagatgctgattccactgagttgaagtggggaccgacgggcagaccacctgggcaaggaacgctggtcttacccgtgtaggcggtgcaggtggggttgtaggagggcggggggtaggaggtcacgatggaagctgacgactcgggctggacgcctgtcgccgtggggtaggtgtatcccgaggacaaggtgctcgctggctgtccggactccactatgggcgcctgctgtgggggctgagcgtggctgtgactgccatgggggctgggctgcccgcaggcttcttgggtccctaggggacagggacaggccctctgcagagccaacccccaccccactgtccctcacctgcagatgggccctggactcaactggctggaacacgctagatgcttaagccaggaccagaggccagagccttgggccaggtgctggcagcgactcgcaggttaccttgtgcccacctctcctttccagagcccggcttctctctcctgccatgggggaggagggctgtgggtgccctagacaagctcctctgcatctccagctccatcacccacagagctcacctcctgccaccccgggaaagcttccttggaaaaaatgttagctgcattttcagtcctcactttccttcattcataggcccacacctggcagagatcccagggcccatctgagcagccagctctgaggctcacctgcaaatctaggatgtttttattatcattattattatttttttttttttgagtcggagtcttgctttgtcaccaggttggaatgcagtggcatgatctcggctcactgcaacctccaccttccaggttcaagtgattctcctgcctcagcctcccgaatagctgggattacaagcatgcgccaccctgcccggctaatttttctatttttagtagagatggggtttcaccatgttggccaggatggtctcgatcgcttgaccttgtgatccacccgcctctgcctcgcaaagtgctgggattacaggcgtgagctgctgcacccggcctttattttgttttttttttttattttttattttttagagacagggtcttgctctgctgcccaggctggagtgcagtggtgcgatcacagctcactgcagctcagttcctgggctcaggcgaacctcctacctcagcctcctgggtagctgggactacaggtgcacaccaccatgcctggctaatttttttgcattttttgtagagacgggggtcttactatgttgcccaggctggtctcgaactcctaggttcaagcaattctcccacctcgggcctcccaaagtgttgggattacaggcgtgagccaccgtgcccggcctctaggatggttaacatgtaactttcacggggtgcagtggctcacgcctgtaatcccagcactttgggaggccgaggcaggtggatcacctgatgtcaggagttcaagaccagcctggctaacatagtgaaaccccgtttctactaaaaatagaaaaaaattagccaggcatggtggcgcgtgcctgcagtcccagctacttgggaggctgaggcaggaggattgtttgaacctgggaggcagagggtgcagtgagctgagatcgcaccactgcactccagcctgggcaacagagtgagactccgtctcaaaaaaaaaaaaaaaaaagaaaagaaaagaaaagatgtaactttcaggccgggcatggtggctcacgcctgtaatcgcagcactttgggaggccaaggcgggcggatcacgaggtcaggagatggagaccatcctggctaatactgtgaaaccccgtctctactaaaaatacaaaaaattagccgggcgtggttgcaggcacttgtagtcccagctactcgggaggctgaggcaggagaatggctttaacctgggaggcgaagcttgcagtgagccgagatcgcaccactgcactccagcctgggcaacagagcgagactctgtctaaaaaaaaaaaaaagtaagtttcccaaggtttccctgtgctgcggggagcgtctcctcgttcccagccccgaccctgcagatggctcacctggctggccggagtctgcggctgtcatgcgcccagactggagggcagcagactggaagtacggcctgtcctcatagctcctggcagctgctgactgtccgtagctgtaactgtcctatgtgggggtttcggcaggagagagacagagaacggaggagagcagctcaggcggtgggtgcgacgcgccctgccacactgcactctgcacttagtccttcctgcagcgctggctcctaagcgtctgcccaggaccaggccctggcccggaggcagggggcagggggcagggggcagggggcagggggcgtggttgacacagcagctgtcatggagccgacactaatttccaagagttcgactgcaatttacaagaggacgcttggtgcggcaggagagggcgggtttgcagggagaagcccccgaggccttggcaaggaaatggagaggggaggaagagggtggggtcaggtgggtgctgagcttgagtgacagggtggcctctgatgccgttgaccgacacaatctggggacgaggtgcgggtggcagagctgggaaattggagcatggtcacgggggacatctttgcgacaccaagtgggaacacggtggctggatctgcagcctgagtgcctcggttgggaaggtgaggtcgtcagcacccaggtgcaccccacacaccacagactccctcttagaaggtaggaatctggagcgtggggaaggtggggtgagtcctggtctctctgggcccaggtggccgaggccatctgccctgaccagggaggggtcctgtaacccaggcgaccctcctcctccttcatagtcactgctgaagctgggacaaagctctgtgcgccgtcactgtccccactgccccgacgtggaggtacgcatgcggcctgtccccgagagcagtggattctttcggaagcgactctgccctgatttctccccaccacgggtacgcaatgccagcagaagggtcccgaaggaaggatcacggttaagaggcctgggagaaggagtagctgtgggaagcccaccgctctcacccatgcaaggcgacccacgtttcccggcaacgctggtcaaagaaaggactggatacctggtaggtagccatggtggtggccgtggggacgggctcctggggtcggctgccgtaggcgaagtcctggccggagtggggctggtatccaccgtaccctgccggggcagctgggggaaaggccgggttcacggcagggtccatcccaggagtgggttgtgcagtatagctggcccccacagtgggcaggggaagggtcggaggctgggcgctagaaccacaaacacacaccaaagccccaccaggttagagcgagttctcaggtgcactgagttgacggtgtcaattccagccaccactggacctgagctgccctgcttggtggagaccctcctaggagcccaggcacggccggaagcactttacacaaattaacaccgtctcacaacaacgctgtaatgctgggcctatcactgcacccaatttacagatgaagaaactgaggcactgtcagtggcagagctgggactcgaacccatctgacttccgctttgcagatgatctacttgtgtggcagggctttttctccatgtcaagattcttcaaagaaaattgaacttttttattttttgagacagggtctcgctctgttgcccaggatggagtgcagtggcacgatcttagctcactgcaacctccgcctcccaggttcaagcaattctcctgcctcagcctcccgagtagctgggactacaggcgcccaccaccacgcccagccttttttttttttttttgtatttttagtagagacaggatttcaccgtgttaactaggatggtctcaacctcctgacctcatgatctggccgcctcggcctcccaaagtgctgagattacaggtgtgagccaccacgcccggccagaaaattgaactttaacagcacagtgtctggccgggtgtggtagctcatgcctgtaatcccagcaccttgggaggccaaggcgggaggattgcttgagctcaggtgtttgagaccaacctggacaacataatgagaccttgtctccaccaaaattaaaaaaaaacaaacaattagcgagtgtgatagtacacgcctgcagtgccagctactcaggaggctgaggtgggaggatggcttgagcccaggaagtagaggctgcagtgagctatgatctcaccactgaactccagcctgagcaacagagtaagactctgtctcaaaacaaacaaaacaaaaaacagtacagctgtccctcactatctgcaagggttgagttccaggaccccctcagatgccaaaatccatggatgcttgagtccctgacatagaacgatatagtgtttgcatataacctaaacatatcatcccatatactgtaaatcatctctggattacttataatacctaatacaatgtaagcactatgccgatggctgttacattccattgtttagggaacaatgagaaggaaaaaccccatacatgttcagtacagatgcatttttttcccaaatattttccacccttggctggttgaatccatggatgcagtgcctatgaatgcggaaggccaaccgtattttctctttaaaaaaaaaatttgtttttgagaaagggtctcgctctgtcacccaggttgaagttcagtgctacgatcacagcccactgcagcctcaacttcccaagctcaagcaaccctgcctcagcctctcagtagctgagaacacaagtgtgaaaccatgcccagttaattctttaaaaaattttggtagaggtggggtctcactatgttgcccaggctctgactgtattttttttaacagaacaagtcagtccacctgagtattaaaataattactttagttagcactaaactaataactcttcactaaaaagaatgagtctttgtagggtttgcacagtgccgaggcctttgtccacatggcctcattcacccttcagaggacatgcggcaccatcgctccccacggtctagacgagaaaacctccaaggaggaccaggggctcatgtcaagtgcaggggagggttcagacccagatctttctgaccccaatgccccttgttcagctaaatatcagctacccagtagacagttctggagtctaaaagcccatttgccagggaaaagtatcagtaaagattttagcccaataccgctatggatatatattaaaaagtgaacctccaaccccataggggaaggagcaaggtatgagggtcattttggggaaaatggattagaaggcaaagaggctctacaccacctggcccccaaccgggccctgctgtagactcctgccagccaggtgagtcatccgcagtgtcagggccggggacaaggagacattctctgcggcacaggaaaacctcatgaaagttacagcttttttttattttttgagacagagtctcactctgtcacccaggttggagtgcagtggtgcaatctcggctcactgcaacctttgcctcctggcttcaagcattcattcctctagcattttcacacacttgtcctgagtgtccacatgctggacattcatgaacaccatgactgtggacacttgatggacaccatgacacagacacccgatgaacaccatgaccatgacactcgatgaacaccatgactgtgacactcgatgaacaccgtgactgtggaacttgatgaacaccatgactgtggaacttgatgaacaccatgactatgggacactcaaacaccatgaccatgacactcaatgaacaccgtgaccgtgacactcgatgaacaccatgaccgtgacactcgatgaacaccgtgaccgtgacacccaatgaacaccgtgaccatgacacttgatgaatgctgtgactgtggaacttgatgaacaccatgactatgggacacccgatgaacaccatgaccgtgacactcgatgaacactgtgaccgtgacactcaatgaacaccgtgaccatgacacttgatgaatgctgtgactgtggaacttgatgaacaccatgactatgggacacccgatggacaccttgactgtgacactcaaacaccatgactatggacactcgatgaacaccatgactgtgacactcaatgaacaccatgattgtgacatttgaacaccatgactacagacacctggtgaacaccatgactgtgacacacgatgaacatgactatgacacttgatgaacactatgactgtgacaatcaatggacaccatgactgtaacacacgatgaatgtgactgtgacacttgatgaacaccgtgactgtgacacacgatgaacaccatgaccgtgacacgtgatgaacaccatgaccgtgacacgcgatgaacaccgtgaccgtgacactcgatgaacaccgtgactgtgacacacaatgaacaccgtgactgtgacactcgatgaacaccatgaccgtgacacccgatgaacatcccgacaatacattcgatgaacaccgtgactactgacatttgatgaacactgtgactatggacactgaatgaacagcatgactacagacacctgatgaacactatgacagtggcagtactcctgttcccacactccctcccgtaggtggctatgaagaaaacagaactacagagtgagtgctatccaggctgcactgagcaccgaccgatgagccaaagagaggaaggtggaaggttccatacgggagctggggcagagcagagctggcctcagctgtacagcccttgctggagaccaccccagcccctcactctcctccctcctcgccagcatttctttgtcctcctggcagccagagaggggtcttttcaaagtacagccctaaccatgccatctcctgctcaaagccctcccaaggccctgccacagccacatcccaccgatcccatccccccgtgtctatggctcccgtccccgctgcctgcaagtggctgctcagtgacaccctgggacgagccctcctggagcccctgtggcctgatgctgatcagcctctgtcccctggtcctgctttttcttcttcctggcaccacccagtatacactgcacgtctgtccacaggccgtctcctccctggtcccgatgccctgagatgcaggaccagctgcagctgcccagctgtctcccggggccgcggcacgtggcatgcagcaggggctccatgcacatctagggaggtcaggcacatgtgctgaacggcgcttgtgttggggagggctctgtcagacacctcagcctgtttctccaagattctcctgaaggaccagaaatcggcagctctacagaaggatggacatgtcccctgggaccgcacacgctctgatctgcaccatcgtggggtgttttcatctctcccaggaaaagcagaagggccctatccataaagaagaaacattcagattccacagatcggccactgtgagatttgtgtttctcttctggaagtctcagagactttattggccaaaaagtcgattaggaaagtggtccaggccgggcacatggctcacacctgtcatcccagtactttgggaggccacggcaggcagattacccgaggtcaggagttcgagaccagcctggccaacatggtgaaaccccgtctctattaaaaatacaaaaactagcccagtgtggtggtgggtgcctgtagtcccagctactcaggaggctgaggcacgagaatcgctggaacccaggaggcggaggcggaggctgcagtgagccgagaccgctccattccactccagcctgggtgacagagcgggattctgtcaaaaaaaaaaaaaaaaaaaaaaaaaaaaaaaaaaaaaaaaaagcagaaagcagtgatcagtagctctcttaatctccttggggatgacacttcttttttatgacaaaatatttcaaacataaaaccacttaacaaacacatatcactgagatgggtaagtgctaatgtttggctgtatttgtgtcagagcttattgtttaaatacagagaattgaagcaccacctggatcctattcctttttcttcctccctagggttggtggctgtcttgtctaatcatgattcttagacttttaactacatatgtatgaaggttttgtttgtttgtttcagagacggggctcgctttgttgcccaggctggatggagtgcaatggcgcgatcacagttcactgcagcctctaactcctgggctccgtatgaatctgtatacaacacggtgttgtgtttttcagttacatgtgtgcaaaatgatgttcttattgtgtatgtcaccccgcaactcgcttctccaatgcccggcaaaccttgtctgaaatgtactgatacgagtccacacggttcactgattttaactccttcttccctacgctgtcctcctacctggacaaaggatcctctgcccaggccctgcatcttagagtttcatcgcccagtacagaagcagcagccacacgtggctgagctcttttttgtttgcttgttttacttttttttttttgagacagtcttgctctgtcgcccaggctggagtgaaatggtgtgatctcggctcacagcaacctctgcccctcgggttcaagcaattctcccacctcagcctcccaagtagctgggattataggcacctaccatcatgccgggctaatttttgtatttttgtagagacgaggtttcaccatgttggccaggctggtcttgaactcccaacctcaggtgatccacccgtctcagcctcccaaagtgttgggattacaggcatgagccactgtgcctggcctgattgttttagatatgaggtcttgctctgtcgctcaggctggagtgtagtgacgtgatcatagctcactgtagcctcgaaactcccaggctcaagtgatcctcctgcctcagcttcccaagaagctgggaccacaggcatgcaccatcacacaaggctaattttgtttttttggggtagagatggggtcttgctatgttgcccaggatgacctccaactcctggccttatgcgatcctcctgcttcagcctcccaaagtgctgggattacaggcctaagctaggctgagcacttaaaatatggcttgtgcagctgaggaacagaatgttaaattttaaaatttgtttcatttcagttaatttagattttgatggccatgcatggctggtggtgaccgggggccagcatggatctaggtcacgccggtcactgcacagatcacacacatacacacacacatgtgcatgagtgaagaagcacatggtgactcggtgccttgttcgctctaggttggccacggttcagggcccgggagacccaggccccatctctggctctacaccatgaaggcaaaaggcgaccacgtcagaatgcttgcaaagtttgaggattctgcctcccagctacagagagagctccaacgtggtttcagagtgcaaggagggtggaggaaagaccacccccttcgcaaaccctcctgttgggaacacggccggcaacgggtcttggagaggaggcctcactcctcggcagggccatggggccgtggccttcctcttctgtgggtctgatttgtggtctcagatgcacccatggatctgtgtgttcaaagcatggttctggcaactgaggagcattttgtaatatgcaggtgcggtggctcacccctgtaatcccagcgccttgggaggctaaggcgagaggactgctggagcccaggagttcgagaccagcctgggcaacatagccagaccctgtccctacaaaaaataaaaaaaaattagccgggtgtggtggagcacctgtagtcccagctactcgggaggctgaggtgggagggtcacttgagcccaggaatttgagacatagccagaccctgtcaccacaaaaaattaaaaaaattagctgggtgtggtggggcacctgtagtcccagctactcaggacttgaggcgggaggatcgcttgagcccaggagtttgaggctgcagtgagccatgattgcaccagcgtactccagcctgggccacagagctggacactgtattgagacagagtctcactctgtcgcccaggctggagtgcagtgtcacaatcttggctcactgcaacctccacctcccagtttcaagcaattctcgtgcctcagcctcccaagtagctaggattacaagcgtgagccactgtacctggccaaaatccataatactcttaaacttgtaggtctgatgtgtcacaggtaaagcagagtgacttttttttttttatttttttgagatagggtctggctctgtcacccaggctgtagtgcagtggcatgatcatacctcactgcagcctccaactcctgggctcaagagatccttccacctcaacctcctgagtagctgggactacaggcgtgcaccaccatgcctagctaatttttttattttttgtagagatgggggtcttgctgtgttggccaggctggtcttgaactcatgagttcaagtgatctgcccgcctcggcttcccaaagcacaggaattacaggcgtgagtcactgtgcccggccagagtaactctaccatagcaacgagagaccctgagcattagaattgcacattgatgtttggaaaatgttagacagcatgcaattcaatttttaaagcaaagaaaccctgtagctgtatataattttgatctaaaaacttgagtcattacattatcttttccattttgtctgaaaaaatgacagctttattgagatataattcatttcctatagaattcaaccatttaaagtataaaatgtagtggttttcagtatattcacagagatgtacaattgtcacttcaatgcatttcagaacttttttttcttttttctttttttttttttgagacggagttttgctcttgtggtcctggctggagtgcaggggcatgatctcagctcactgcaacctctgcccccagggtccaagtgattctcctgcctcagcctgtcgagtagctgggattgcaggtgcacgccaccaagcccaactaattttttgtatttttagtagagatggggtttcaccatgttggtcacgctggtctcgaactcctgactgcaggtgctccacctgccttggcctcccaaagtgctgggattacaggtgtaagccaccgtgcctggcccatttcagaacatttcatgaccccacaatgaaaccccagcagaagggaaaatgtaatggtgcagccattgtggaaacagtctggcagttgctcgaaagttaaatctagaattatctcatgactcagcaattccactcctaggttcctactcaaaggaaaagaaagcagaggctcaagaaggtattttacaccaatgttcacagcagcactgttcacagtggctaaaaggtaggagcaacccaaccgtccatcagtggataaatgggctgggcgcggtggctcacgcctgggatcccagcacttcgggtggccgaggcgggcggatcacttgaggtcaggaggtcgggaccagcctggccaacatggtgaaaccctgtctctactaaaaatacaaaaaataactgggcctggtggggcgtgcctgtaatcccagctactcaagaggctgagctgggaggattgcttgaacccaggaggtggaggttgcagtgagttgagatcgcgccactgcactccagcctgggagacagagcaagactctgtctcaaaaaaattggatgaatgaacataacgtggtccatccacacagtgaaatatgattcggccttaaaaagaaaacaagtcctggccgggcgcggtggctcacgcctgtaatcccagcactttgggaggccgaggcaggcagatcacgaggtcaggagatcgagaccatcctggctaacatggtgaaaccctgtctctactaaaaatacaaaaagaaattagctgggcgtggtggcgggcgcctgtagtcccagctactagggaggctgaggcaggagaatggcgtgaacctgggaggcggagcttgcagtgagcagagatcacaccactgcactccagcctgggtgtcagagcaagactctgtctcaaaaaacaaaaaagaaagaaagaaaaaaaacaagtcctgacataggctacaaggtggatgaaccgtgaggacatcaggctcagtgagagaagccaggcacagaaggacaaatcctgtgtggttccagtcctaggaggtccctagaggtgtcagattcacagagacagaaagtaggatgtgggggggggggtgccagggaccggggaggggaaggggagtgagtgtttcacggggacagagcttcagtttgggaagatgagaaagttctggagatggatggtggtgacggctccccaaccacgtgaatgtgcttaatgccactgaactatgcacttattaataaaacggtaaaactggtcaattttatgttatctagactttatcataataaaaagcaaagaaacctcatatccactaccaatcacttcccctctccacccatctatcttgctttttaatgttaatagaaatttctgaatattataggaaagtaacttttaaaaaaacatacaaatgaagttaacttttcaatgttttacttttttttttttgagacagaatcttgctctgtcacccacactggagtgcagtggtgcgatctcggctcactgcaacctccacctcctgggttcaagtgattctcctgtctcggcctccggagtatctgggattacaggcatctgccaccatacctggctaatttttgtatttttggtagagacggggtttccaccatgttggccaggctgatcttgaacccctgacctcaagtgatccacctgcctcagcctccaaaagtactgggattacatgtgtgagccactgcgcctggcccaatgttttacatttaaattgcatttataatgaagacatatttaatttttgcacatttgtggtttaatggcatcttgtggttgaatcctttagatgagtcagggttccagcagagaacgaggcctggtactctgaggcctccacgtgggaaggaattcctctccctccctggagtctggaatggagctccccgtggcccactcccgggggactcagtctctgcagctagtgtctgtgctctgcagtttccaggcagaaccctgattgggaaagggggctgcagggttgccccaggtggtcatggccaagtaccacagctgggtggcttcagcaacacagacttatttattctcacagttctggagcgtggatgtcctagatccaggtgtcagcagggccggtccctctgtggcttgcagacggcagtctttgccctgtgtcctcacgtggttgtccctctgtgcgtgtctgtgttctaatctcttcttacagggatccagtcggattggattagggcccattctgcattgggctaaattgattaagtttaattcatttcaacttaattctctcttcaaagaccctggctctccaactgcaccctagactgggcagcatagtcagaccctgtctctacaaaattttttttttattacagaagtataaaggggggccagtcatggtgcctcacacctgtaatcccagcactttgggaggccgaggcaggaagatggcttgaacccaggagtttgaggccagcctgggcaacatagtgctaccctatctctattaaagaagaaaatttcaaaaaaagaaaaaaaaaaaaggtaaaactgcaacatggtccctacaaggtcacacttttgtaatcccagcactttgggaggctgaggcaggaggactgcttgagcccaggagtttgaggccagcctgggcaacatgacaaaaccccatctttacaaaaaaaaaaaaaaaaattagccaggcgtggtggtgtgcacctgtagttccagctactcaggaggctgaggaaggagggtcactggagcccaggaggtcaaggctgcagtgagccatgatcacaccactgcactccagcctgggaaacagtgagatcctgtctcaaaaaaagaagaggaaagaaaaaaactaaaaataagtcaagaccctgtctccaaatccgggcatattcagaggtactgagggttaggacttcaacacaggaaggtgtgggaaaagggcgcggattcagcccctgatggctgcttcaggtcatgtccataatacactgaaatgatatggaaatctttttcttttttgttttctgaaacggagtcttgctctgtcgccaaggctggagtgcaatggcacaatcttggctcactgcaacctctgccccccaggttcaagtgattctccagcttcagtctcccaagtagctgggactaaaggcgtgtgccaccacgcctggctaatttttgtatttttaataaagacggggtttcaccatgttggccaggctgttcttgaacgcctgaccttaggtgatccacccgcctcagcctcccacagtgctgggattacaggcgtgagccactgcacctggcccatttttccaaatatttttgatcggcagttggttgaatccacagaggcagaacccatggatagggagggtgggctaattaaatccagccatctttgatgttttgccgactcgaaaagccacagcaccacacagtttttgtgtatgttgttagaaaggtatgtttgtcatggtgagcgggacagaacatactgtatttaactttagcgagcttggttggtaatgttaaaatatgtagacatatggtaggcaggcttccatctgtacttctgccctgggcctcccaaatgtaaagactgattagttacataagcagaacacgcatctttaaaaaaagactgtttacttgtttgaaactgtcccgattcattcacctttttcccattttccttactacataagcggaatgtgcttctaaaagaagaataattgtttacttgtttgaaaatatcacaattcattcacctgttttccttaattacataagcagaatatacttctacagaaaagactgtttactttgaaaacatcatgattcattcacctattatccgattggtggacatttatactatgtgttagttatctcctgctaagtaatagattaaccttgcaaaacaacgaggctttaaacactgtgtctgtggatcaggaatttgggacgggcttcgggcttctggcttggggtcttttatgaggttgccaatgagaggtcagcggcgggcagcaggatctgcttccaagatgccttcctgccagggttggcaagttggtgctgactgttggtggcagtccttgttcctcccaggcaggcctttcctcacacggcttgagtgtcctcacaacatggcggccagcttcctccagagcaagggatatgagggagagcaggggagagggcggcacacacagcaggtgaaagttgcccttgttatgatgcagcttcaggaatcatttcatagagccgggggcaggggggtggctcacacctgtaatcccaactactcgggaggcagaggcaggaggatcgcttaagcccaggggttctagactagcctggccaacatggtgaaagcccatctctactaaaaacacaaaaattagctaggtgtggtggcacgtgcctgtaatcccagctactcaggaggctgaagcagtagaatcacttgaacccgggaggcagaggttgcagtgagctgagattgcactactgcactccagcctgggcaacagagcgagactccttctcaaaagaaaaaaaaaagtattttttgaaaataagaatatttgtaaaaaagaatcatatagcataacttctgccacattccattaattagaagcgaatcaccgaatccgacctgcacacacggggagaggctcaggcctcaccttttgaaggaaggcatagggaacaatttgcagacgtatttctagactgcctcacgttgtttccaatctttcgccattaaagcaatgctccaaggcttattctagagtggcttcttgtcctgcctgagccctacaccacccacaaggcactaagagtcaacggcaaagaggccgggagagctgatttagaatcatcaggctccactcctggagccgggaccaccctctcctgagacatacaggagaggggcggagtccaaaccaagctggccagaagacaggacaggatggagactgggaggacacccacaggccctctctttggttttgtacaatctacagagctcaacaagagggtatgatcggcccaagatatagtgcaggggcagggaaatccaagtacggttgcagctctagagccctttggactgagacctgctgcctcttttgtataaaaagctttcatggctgggcacagtggctcacgcctgtaatcccagtactttgggaggccgaggcaggtggatcacctgatgtcaggagttcgagaccagcctggccaacatggtgaaaccccgtctctgctaaaaatgcaaaaattagccaggcatggtggcgggcgcccgtaatcccagctacttgggaggctgaggcaggaggatcgcttgaatgggggaggtggaggttgcagtgacccaagactgtgccattgcactccaggctgggcaataagagcgaaactccatctcggaaaaaagctttcatggccaggtgtggtgtctcacacctgtaatcccagcactctgggaggccaagatgggaggatctcttgagcccaagagtttaagaccagcctgggcaacatagcaagatcccatctctacaaaacagaaaaattagccaggcatggtggtgcacctgcagtcccagctcctcaggaggctgaggcaggaggatttcttgaacctagtaggttgagatcacaccactgcactccagcctgggcaacagagcaagaccccatctcttaaaaacacaaagtgttaggctgggcgcggtggctcacgcctgtaatcccagcactttgggaggctgaggtgggcggatcacgaggtcaggagatcgagaccatcctggctaacacggtgaaaccccgtctccactaaaaatacaaaaaaaaattagccaggtgtggtggcgggcacctgtagtcccagctactcaggaggctgaggcaggagaatggcatgaaccccggaggcggagcttgcagtgagccgagatcacaccactgcactccagcctggacaacaaagcgagactccgtctcaaaacaaaacaaaacaaaacaaaacaaaaaccaaacaaacaaaaacacaaagcgttcagtactagatagtaaatcgtgagtagctttctggggaggaagctccattcttctctggcttccctgggtcctgagaccttgcccctccaacctggaggcccaggcgtgctgagcagcaccagcagagggctgtgggggcaagtgaacctcaggtggaaggctgagcagagtccttcagcccaggaccccaaggaaggagcaggaacctgtggggctttctctatctgctcctgctgtgcctccgcacacagctttgtctccacctggtggacaccccacctaagaggacagtggaggcggctggttggtgaactggctccatggcagagatcagacagcccatgcagcagagggcagagctttccaactcaggcccttctgacatttgggacaacattgttctctggggtggggccgttctgggccctgcagcgtgctgagcagcgtccccagcctccacccactccatgccaggagctcccccaaatcgtgacaatgacaaatgttcccagaccttgaccagttaagaactgatggtctaggacaagctcaatgccagggcgtagccttgtgcaggtggacagagccaaaggctgcttcctgcctggttcagcccatactctggaaggatccccaggatgttgtaggctggcctctgacttggagtcaggcttgagtcagcaccatgaagacagtgaatgaaaaagaacacgctcttcttgtagacaaccctgaacagcaatgctcaggcacgctacagtttggaatccactgagccagggcgcagggaaaatggatgtgcgaccaacatgcagatggctggacgtccgctggctgagggcaggtctcagcatccctgctggcctgcagggcaactcccactggtttcagtgttacaccctgtgaacgtcacagctgtgagcagactgaggacctgtgagggatacagggtcagggtgacatcaggcaagatacccttgacctcgccgcaggtccccaccctgtcccgccactctgctgtctgatggcaggaatggagtgcctctcctacacagataacagagacgcgggggcagaggcagcgaaacccaggcaccctctgggagaaggaggggcatgccaactgctctgaagacccaggaggctcccccagaggctggaaaagccccggggaagggtgcctgggatttcaaagaggaggggctcgctgagaggagcgtgggagaaatgaggagtgctggtggggcgactgtcctgggtgctgagggacagaggttatcagggtgaggggtgacgggaggcagctcagggctctccagtgccaggtagaacctgggatttatcctcagccatgaggagccacctgggcatctcatgacaagctttggcctgaattacgtccccctgcccccaattcttatgttgaagccctaacccccatgtgactgtatttggagatgaggccttcagggagggaatgaaggttatatgacgtcatcaggtggggactgatctgagcagaactggggtccttataagaaaaggaagaggccgggcacagtggctcacacctctaatcccagcactttgggaggctgaggcaggaggatcacttgagcccaggagttagacatcagcctgggcaagatactgggatcccatctctacagaaaaacaacaacaacaacaacaacaacaacaaaacaaacacacacaaaaaaaccacactttgcgcctgtggatccttgggaggctgaggtgggaggctcgattaagctcaggagattgaggctgcagtgagctgtgatctcaccactgcactgcaacctggatgacagggcagtcttttcaaaaaaaaaaaaaaaaaaaaaaagagacaccagcagtgcacatggacagagaaaaagccacaggaggacactgtgaggaggtggccatctgaaagccaaggagagagccctcaccagaaaccaccccctgctggcacctagatctcacacttctggcctccagaacagggaaaaaatacattttgtttaagcctcagtctgtggtattgttagggaagccccagccgaccaagacaggtggagacggttagagaggggagcagttagagggaaggcccattaaggacacgagacacacaggggccagaactagagggggtgatggacagggggacagaacacatgcgccatcatgtcaccggcaggaaagcacagtcaaagccagctctcagcagtgtagggctttacaaacacctaaaacagggcctgggaacagccaagagtaatatgtgtttggtgactgtgaccacacagtgaccatgactcaggaagggaacacttggcctgcctcatctcaagtcattgcttgtgaccccagaagccaccaaaacatgcaaatgcatgcacacacacgtgcatgcacacactgctgttccattccactaagcatgcttacacgaggaagtagagcatgggctttgtctccaatggggcagcccacatcttcatgggtctcacacccactctcaggggagaccatggcctggcagagcccagaatttaggggaggaagggaggggacagaagggtttttaagatggagtcagctatgtatggccaaatgcggcctgcctgtttttgtacagtcccaagctaagaatggtttttataattttaagtgactggaaaaagttaaaagggtaataatacttcatggcatgtgcaaaattacatgaaattcacatttcagtgtccaaaaaaataaagttttattggcacacagccaagcccactggatgacacattgtccacggctcatcttgcaatacaatagcagggttcactaatgtgacagacatggtgtggctcacaaagccaaagatatttactatgtggctttttacagaaaaggtccgctgacctctgactcaaagcaacaatcatttatttcacttgtgattctgcaggcggggatcagctgggcagctctcctggccaggcggggctcagctgggtgcctcttctggccaaggcggtgctcagctgggtggctcttctggccaaggcggggctcagctgggtggctcttctggcccaggcggggctcagctgggtggctctcctggccaaggcggggctcagctgggtggcaatcctggcagaggtggggctcagctggatggctctcctggccagatggggctcagctgggtggctctcctggctgaggtggggttcagctgggtggcaatcctggtggaggtgggcctcagctgggtggctctcctgaccatggctgggcttctctgcccctggagggcagctacctgttggatggggcactgtgactcttctccttatatctcctcctccagcaggccagccttgggtccttcaccaggcagggtcccataagatggagcagatgcaggcaaggcctcttaagcttgggcacagggcagtcacagcgtcacttccactgcagccaactgtccaaggcagggcacaaggaagcccagatgcaagggccgggggagtggtctccacttctggactggaagagtagcaaggacatggtgggaagggcatggatataagggtggatgaaggatgaaggcattttggcaacaatctgccacattgtggtttcaggagctgagccagcaaaaacacagctcctgggaagaacaccccacagcatgactcatccagacaccaaaaccaaggcagcccagggcagtggttctcaaagagggcaggttttgcccccaggagacactgggtgatgtctgaggacatctgtggttgtcaccacttgggggagctcctggcatggagtgggtggaggccagggacgctgttcagcaccctgcagtgcccagaatgacttcactgcagagaataatccagcctcaaatgtcaaaagtgctgctgttggccaggtgcagtggctcacctgtaatcccagcacttcgggaggatcacttgagcccaggagttggagaccagcctgggcaatacagtgagaccccatctcttaaaaactgctgctgttgagaaactcagatctgggaaggacaggctggggtccctggggctggggactagggattagagcctagctctgcagatggtcggcagccaacattgctgcttctgccaggtctcagatgcgacagggagaggcccacagccctccccgggttcccagcgtgggcggtcacgctgactcccccttgccttctcacagtttagagtcagatgaaagctgtggcctcccgccctgccctgatcccctgaaaatgacaaagacaggtgtgcctgtagttaccttaggtttcccagaccccgggttgagaatccctgctgtcacaggtggatcaaaaagcatttgttgaggttaaatggaaaattttgtattatatatattttgccaccaaaaaaaaaaattacactctagcacatgctgcatggatgaaccttgaggacatcacaccccgtgagagaagccagacacaaaaggccatacaatatgtaattccatttctacagaatgtccaggagaggccaatccacagaggcaggaaggggatttgtgggtgccaggccctgaaggaggggttaaaagtaatggctaatggagatggagtttccttttgggccgataggaatgttctggaatttgaggtaacagtcacacaattctgttaatatactaaaaaccaggctgggtgtggtggctcacacctgttaatcccagcactttgggaggccaaggcaggaggatagcttgagcccaggagcacagttcaagaccagcctgggcaacacagtgagacccccgcctctacaaagtctctacaaactacaaaaattggccaggcacagtggtgtgtgcctgtagtcccagctacttgggaggcagaggtgggaggattgcttaagccctggagtttgaggctgcagtgagctttgatcacaccactgcactccagcctgggcaacagagcgagaccctgtctcaaaaaaaccactgtgccctgacacaggcagggcacagtggcctacgcctgtaatcccagcactttgggaggccgaggtgggcagatcacttgaggtcagggttcaagaccagcctggccaacatggtgaaaccccatctctataaaaatacaaaaaaaatgagccaggcatggtagcaggcttgtataatccccagctactccggaggctgaggtaggagaattgcttgaacctaggaggcggaagctgcagtgagttgagatcgcaccactgcactccaggctgggtgacagagcgagactgtctaaaaaaaaagtcttgttctttctaggcttttctagcaactaccacataacaggcgcttcacagccatctgcagagtctgattcagagacacctgtggtagctgagaccagcgatcatgtgaacacatcatctccggaccaaaaccaaaagtcgattattccaaacatggtcagagctcagattcctacatcccagagagaaaccactcagaggctgacatagatgacactagatggttagggcaggggtcttgatgtagagcatgtgcccgtaaactctgcaataaactcacaggacaggaagtagcccttttacattcttgcagagaaaaagagttgggcagaaaacaagagttcttctaaactacatcattaagaggttttttgttttaagagacagggtctcgctctgtcaccctggctagagtacagtgatgcaatcatagctcactgcagcctctaactcctgggctcaagtgatccacctcagcatcccaagtagctgagactacaggtgtgcaccaccacacccagataatttttaaattttttgtaaagtcagggccttgctttgttgcccaggctggtcttgaactgctggcctcaagcaatcttcctgcctcagcctcccaaagtgctgggattacagatgtgagccactgtgcccagctaattttttaaatttttggtagagatggggtctcactatgtcgcccaggctggtctcgaactcctgggctcaagcaatcctccacccttggcctcccaaagtgctgggattactggcataagccaacgtgcccagccaagtttttctttttttaatgtgaattttttacttctactttaaatcccaacttagcatggaaaatcatttgcattttcagaacaaaggaggccatcttctggctaagctgaaaaaaaaagtcattagaggccttctgaggcaccattttaaagatgatattgcttttgcgggttgcactatgagaaattctgtgtgtacaaaatacctgacagaaagtgaaagcagtcccgggcgatccggcggcagattcattgagtcattggataaatacttcctgggtgctagtggggaccagctgctgtcatgggcgctgtcacagcagcggggaataaccagaccaaagtcccgtcctccaggagggtgctgcgcgatagtccagggagacacggggtcagcaaaataattcaacgcgatctgatggttctcatgccgccgggaaggacgcggcaagggggtgtgagcagggggttgcactttctcacgggctggtcatggcgggcctggtgggtgaggaggagggtgaagacacaaagttggggaaacagggcagcgcatttgagcagagggaattgcatgggaagggcctgagggtgaagtgcccggaacctggattggtccagaaggcagcgtgactagagcggaaggaatgaggggagatggggtcagagaataaagggtgtggaacagggggcagaggacaccatgatggatgtcacaggccatcgtaggggctccagcttgtcccctgagaccccacgggggtttccagcggaggagggacatgggctacgttgtgatggggcctctttggcgctgtgcgcggatggaaatgggggcgagagcagaaggaagcgtgaaggtccaaaatacagacgaggcaggctggtgcgcggtggaggcggtgcgcgtgcaggggcgtgcgctcaaggtcagaagaaggaaaggaggccagcctggcttcccattttgggatctgcacgaaggactgccggcggccctgcctgccgcggggaagccagcaggatgaaggggttttggagaagcgtgcaggcgcttggacttggatatgatcagcctgagatgccagtcagacatccacagagcatgctgcatgggccgctgtatgcaggggccgagactagagctccagggagaggcctgcgctggagtcagaaactgggtgtcatcgatagttaatatttttttaagattgagatatagtccacactgtaacatcccccctttaaagtgcacggttcggtggcatctagtacatttacaaggctgtgcaaacatcacctctacctaatttcagaatgtttccaccaccccaaaaagaaacctgtccccatcaacattctctccatccctccccagcccccggaaccactaatccatttcctgtctctatggattcacctgtaaaatgggaacacctaatttggtatggtgatggtgtgatgattaaacaagaactcacaggctacagggcccagcatgtggcaggagcttacgatgtagcccagggtagccagagtttcctttatttttggagacggagtcttgctctgtcgcccaggctggagtgcaatggcgccatctcggctcactgcaacctccacctccctggttcaagcgattctcctgcctcagcctccccagtagctgggaatataggcacctgccaccacgcctggctaattttgtatttttagtggagatggggtttcaccatgttggccaggctggctcgaactcctcacctcaagtgatccgtccacctcggccttccaaagtgctggattacaggcaggagtcactgcacctggccccagagtttccaattttaagcgatgctaggaaccagaggttttgtgaaatcttcttttttttttttttttttttttttgagacggagtctcactctatcgcccaggctggagtgcagtggcacagtctcgactcactgcaacctctgcctcctgggctcaagcgattctcctgcctcagcctcccgagtacctgggactacaggcgcaccccaccacgcccagcggaatctcccacttttaaatgctggcaactaattcaaataaagcaagcaaaaagctcactgcacaggcgtgagaaccaaacacggcctgcaggctgtcaattttcaaagtctgacccacactgaggaggtgagagcgatagttgagaaacaggtataaaaagtcacaaactggccgggtgtggtggctcacacctgtgatcccagcactttgggaggctgaggtgggcggatcacttgaggccagcagttcgagaccagcctggccaacatggtgtatacaaaaaaaaaaaaaaaagccgggcatggtggtgcatgcctgtagtcccagctactcaggaggcactgaggtatgagaatcacttgaacccaggaggcggaggttgctgtgagccgagattgcgccactgcactgcagcctgggcaatgaagcgagaccctgtctcaaaaaaaaaaaaaaaaaaaagtcatgaatttattctcagtaaagcctgcccataaccaatgagcccaggctatttgctgctgctgctgctgtttggagtcacctgttgctggaaggaactgtgccactgtactacaccagagacagctgccatctccatgacaacaagcacgcgctggtgctgcctgcctgggaggggagaagagcacaggtgggaaacggggagcccaggctaacatggacttacaaacagtggtgacacacgtctacaagtcctgcccggcactcccaccttcaggccccaggctaatgtcttttgatggctttttggtcggagaatttgttttgggaagtcaagctttttcaggtgcatccttctaaactgaattttgggatgcaaagctagcgagccccactgatctcattttgttcacacggccaccaaactcaaggggacgtcaaggcctaggggatggaatgggcccatctgagctgcccacgtcacctggcccagagctctttctgtagggccatgctcttgcttgctccgaagagacggagcaggcttaggtgtggtccacacttcagagggacacgggtgggatctgcagatagaggcaggtggcgaaatgtcttagggacagccaggaagatgggtcattctctatttgcatataatgctaatttctgctgaacactgcattgaataactcaatgggaacacacacacacaaaaccccccaaaacatttagagtccaaggaaaaactcaagtggaaataaagattttcctggaatcacaggctgagaaatgtcatcattctttctaaaaacaaggactcagtcaggtgcagtggctcacgcctataatcccagtgctttgggaggccaaggcaggcggatcacctgaggtcaggagttcaagaccagcctggacaacatggtgaaacccagtctctactaaaaatacaaaaatcaaccgggcatggtggtgcatgcctgaaatcccagctacttgggaggctgaggcaggagaatcacttgaacctgggaggcagaggttgcagtgagctgagattgcaccactgtactccagcctgggcgacagagtgagactccgtctcaaaaagaaaaaactaaaataattaaaaacaaggactctttcttcccgaacacagctcatcacctatttctctatcacccccatggcagatggagatgaaggctgaggccacccagctggaaatggaaatgtcacagggccctgtgatggttaatactgagtgtcaacttgactggattgaaggatgcaaaatattgtcctgggtgtgtctgtgagggtgttgccaaaggagagtgacatttgagccggtggacagggagaggcagacccaccctcactctgggtgggcaccatctaatcagctgccagctcggccaggataaaagcaggcagaggaacgtggaaggactggactggctgagtctacaggccttcatctttctcccatgctgggtgcctcctgccctcgaacatcagactccaagttcttcagcttttggactcttgggcttacaccagcagttggccaggggctctcgggcctttggccacagactgacggctgtgctgtcggcttcccgacttttgaggtttggggactcggactgatccacccctggcttccttgtgcctcagcttgcagacggcctatcgtgggactttaccttgtgaccgtgtgagtcacttctcctggataaggtccctttcatggagacctctatcctgtgagtcctgtccctctagagaccctggctcatccagccactgacttccgtgccccgggaaccgctggagaacacctgcactcccgcgttctgaccttggcgcggtgggtctgcgactgcgtgcagcgtgagccacacccaggtggagggcgcagggcctcaggggccagagagacaacgtgccctgccacaccagaggctaatgcgtccagtcaagtccttcatcagggagagagttttcaagtctgttttaccagcagtaagacgacatttcaatcgctgtgtgtacacacaacacacacacacccagaatttcattttgtggcacttctgttcacaggggttttatattcaaaatgcatcttacacattcatacccgtaacagtcctgattttgtaaccagtttttttctttttctttttttctgaccatgaaacccttaggtgcagtctccatgtgaaatgcccatttcagatccagaaacccccaaaatgtcccaacgtattggaaaggagttctgttaactcaatcctcgggaagataccaaaaggacttttttgctttttgagtcagggtcttgctctgtcgcccaggctggagtgcagtagcacaatcatagttcactgtggcctcaaactcctgggttcaagtgaccctcccgcctcatcctcccaagtagctggaactacaggtgtgcaccaccatgcctggctaatttttttttttttttttttcagagatggggggggtctcactatgttgctcaggctggtctcgaactcctgggctcaagtgatcctcctgcctcggcctcccaaagtgctgggataacaggcgtgagccactgcacccggcccgaaaggattttatcaccccaggctcactttcaaaccgtcttcttttgaatggagtcaagaggccagctccaaaccaggacccgcctggttcctcaggatggagccaccatagggcggcaggttcttgaggtgggaattggattccagagcctgggcgtcgagtttcccgagcctcgggggcgagccaggttatgcggcagtgggactgatgggcttgtcctctgccctgctgagaaggaacatggtcccacgtggagctggctgcatggtgagccccaccaggcaggtgcttgagaacaccaacttgacgataccatgctgatcacgctagagaaggcattagctacgtgccctcccagacgcaggacaagcgacagaatttccaacagcatcggctcactacggcaacacctttttactcttgtgcaccaaactggccgacatctcaggaacaaggaggggtcatctcctgttccagccctctcctgctgctttaagaaacggaacgacctgcagagccctgtctgtgctggctcatgagccgctcgtgtcaagggcaggacaagatggcaaaccccaggttctcatgagcaaccacaaccggcctcgaaccaccaacctggactcaaccaacgacactcaaaacaacagacaccaccggctctttatacatccatggcaagggcctggggacattacaggtcactctgctcccaaggggcagagctcaccacagacttcacctcctgcggcaggactggccttcccagatccacaatgccgcggaagcagagccatgccgcctctccactctccgccaaccgcgacaagtaaacgactcacaataggtccatttaaaaaggcaaatggaacttaccttaggggaaaaaaacctgcccaaagcaaaaggaacatatccaccaaaaaaagaagtgtcattcccccaaatatgtacaaattaactttctagctaaaagaaatctggcaactttaaaattaaagttgagcagagcgcggtggctcacatctgtaatcccagcactttgggaggccgaggcaggtggatcacttaagctcaggagtttgagaccagcctggccgatggcaaaaccccgtctctacaaaaaaatacaacatttagcctggtgtggtggtgtttacctgaaatcccaactacttaggaggccgaggagggaggactgcttgaggccaggaggttgaggctgcattaagttatgaccacaccactgtgctccagcctgggtgacagagtgagaccctatctcaaaaaataattgaaatagggctgggcacggtggctcacgcctgtaatcccagcactttgggaggccaaggcaggtggatcacctgagatcaggggtttgagaccagcccggccaacatggtgaaacctcgtctctattaaaaatacaaaaattggctgggcgtggtggtgcatgcctgtagtcccagctgctagggaggctgaggcaggaggattgcttaaactcgtgagccagacgttgcagtgagccgagatcgcgccattgcactccagcctgggcaacagagtgagaccctgtctcaaaaataataataataaaatacaaagacaatgaacacagggtttacaagtccctttctacgtgttttccttatttttctagggctgcctagttatttatctgatcagggcctttgtcccatgacccccagaaccccaggaaagaacaccaatattcattaccctcaggtgaaaagactgttttccagggccatttgaaaatgcttttaaatctgatgtatttgttctgatcattctaaatacacacgttggtagacccacacaagagacaaatacaaaataaaactattaaaaatccagaaacagagaatatgtttaggagagaaaaaagtctcctaggaatttacttctgccccagtatgtatgaactaacttttggttcttttcttttgagatggagtctcactcggttgcccaggctggagtgcaatggcgcaatctcagctcactgcaacctccacctcccggattcaagcgattctcctgcctcagcctcccgagtagctgggaccacaggcacgtgccaccacacccaggtaatttttggattttcaattgagatggggtttcaccatgttggccaggctggtctggaactcttgacctcaggtgatctgactgcctcagcctccccaaatgctgggattacaagtgtgagccaccgtgcctggcctaacttttggttctaaaacaagtaagatgaaaaatcaaaatccacacttcaaaaacatccaatctacctaattccttgtataggagctcagaccgcaagtcctgtcatttgaaaaggtttcctgaaagtacacttcaacccattttcacgtgcagccggcagctgcctctcggattctcttctaaggagttcagcccctaacacgtatttcagccttgctgagaagggcgtgaaaaagaccgcagcaacatgggaggggcaagttcccccctcgctcctccagggtcgtgctccctggaaagaatgggtgcagcagaggcacagttacttattaggatgtgcaaacagctggaggggcccacggtctcactttcctggggctttttggacctggtggtaggagtccatttacaggtatgcgccctggcccccaaggtggcgacatcggactctccagggcagcctgtgttccttggacctaagctcaaaggacggggttggccttggtgggtggggtttccactggaaggacctggaggcctgccggagggcgagcgtggcgtctgggctgggtatgaccaggtcggttctgaagccggttgcagccacacctggcaggcaggggctcccatcaggggtattaacaggttctgtcactggcactggggctgccgagcctgttctcatggtcagcatgggctccgggcctttttcaagctacctgttgcccgggagacatttttgagagatacgggttgggtcaccgttactttcccagtgacacggggccatgtgctgtctcaatgtccccactccggggaggggctcttgtttttttattgttttttgagacagggtctctcgctgtcgcccaggctgcagtgcagtggtgcgatcatagctcaatgtagcttcaacttcctggcctcaagcaatcctccctcctcggcctcccaaagtgctgggactgcaggtgtgcactgccatgcctggccatgtgttttttaatgtctaaaggatgtagccctaaaccactatctgaccgggccctgaactagcagggcaggggcaggtgacagcgtaaaggatggcaataacacagtctctaccacaggcgcaacctctaagctgacgtggtcagggctgggttccacaccacggctgcctctctaggctccagcagccctgactgtgagtgaggcactggcctgggcccattcctagccgggccgaccactgggcccccacgtcagtccagtgactgcccccaagcctcactttcctcatcagcaaaatgggcttcacaacacctaccccaaggatcacgtgagggctcagtcagtatcaggtgcccgggactcacctcacacagagaatcaataaccagcaacgagcatcctgcccatcactaacagagtgtgatggcgttccaaccccgcctcccacttcctgaaactctccaggggaaggagctcagcttataatgtatgctaatagtgtcagaatctaattgcagggaggaagtgcctgtaatcccagcactttaggagggaaaggcaggagatctcttgaggccggttcaagaccagcctgggcaaaatagcaagaccctatctctacaaaaataaatatcgccaggcatggtggtgcgcacctgtcgtcccagccactccaggaagctgaggggggaagactgcctgagcccagaagttagaggctgcagtgagccaagactgctacggcactccagcctgggcaacagagtgagatcctgtctcacaaacaaacaaacaaacaaacaaacaaacaaacagaggttctctggacaggacatcaagtattacaccaaaatccagtagtcttctaactcagatttaacaagaatgcaaaggcacagctagccgactgcgtaatactggtggaactgtgacaaactgctaaacaaagagaaaggtaacggcagaggcctctggcctgtcgcttcccactactctgcacttccaacacaccactttgagctctacatactttcatgactagtgtgacttaacatgtacagaccctgttggagctcctcagctattctcagctaaaaaactgtgctcaatgctaatctttcttttcttttctctcttctcttctcttttctttttttctctctttttcttgagacagactcccgctctgtcacccaggctgaagtgcagtggtgccatctcagctcactgtgacctccacctcccgggttcaagcaattctcctgcctcagcctcccaagtagctaggattacaggcatgcgtcaccacagctggctatttttttgtatgtttagtagagattgggtttcaccatgttggccaggctggtctcgaactcctgacctcaggtgatctacccgcctcggcctcccaaagtgctgggattacaggtgtgagccaccgtgcccggcctgcgctcagtgctaattaaaagcactgctgcattcagttttccacatgggattaatgtttcattctgaagacctgcagcactaattcaacttctaaaaaaaaatatgagattcataagaccatataaaataaaataaagataatcaacattatcaacagctaactgtaaacttttcttatgccttcaagagtgaatgtgggtccaattcttactgaccaacaattaagcagttcagataccaaccctatttatggatgaaaatgttaaggaaattcctacccagggctacggttatcatttttttgttcatttgttttagagacagtgtcttgctctgttgcccaggctggagtccagtgttgcaatcccaactcactacagcctcaaactcctgggctcaggtgatcctcctacctcagcctcccaagcagctggggactataggtgcacaccaccacatctagctaattgttaatttttttatagagatggggggaaaggtctcatcattttgcccaggctaatgtcaaactcctgggctcaagtgatcctcctgtcttggccttcgaaagtgctggagcgacaggcatgagccaccatgcctggcctggttatcaattttataagctaagaaaacctacccaaaactcctaaaaaatgaattgctgcctttgttttggcaattcttgaaacaggtgttgtaaatactgctgtccaaatgctgccataaaattggtacacaaaatctggtatctcatcagttttctcatggcaggttatataaaccataggtacttttttgtttgtttgagacagtctcaccctgtcgcccaggctggagtgcagtaacgtgatgatctcagctcacagcaacctccacctcccgcgttcaagagattctcctgcctcagcctcccgagtaactgggattacaggcgcgcgacaccacgcccggctaatttttgtatttttaggagagacagggtttcaccatgttggccaggctggtctcgaactcctgacctcaagcgatccgcttgcctcggcctcccaaagtgctgggtttacaggctgagtcaccgcgcctggccaaaacatacgtactttaaaagcagccaaagtttccaaacaaaagtcatttcccacaagaaagaatgtctagttaacctaaagtcattcaaataatgcctatcatcttgtttcaaggttttgtgagaatgaaatgtattttgctatgattcctgtgttatttttagttaatagcttactattttcttaaggaagaacacattctctctgcggcaattctaaggacggactaactcaacaactcaacaccgggttgcgtgtatactgtatcacctaagccatcagaacacagaaggtagctgtgctaaaatgggttgcgtgtatactgtatcacctaagccatcagaacacagaaggtagctgtgctaaaatgtataagcacgttaattcaaatcaatgacagaagcctctactgaagcttagcaatcacctatttgaacaacataaacattcaatttctcctctggaaggtaattttaatagcaagcataatattcaagtgattttccacgtctgatggaagaatacaatggagaaagaaagaagagaaagagaaaagaaggaagagctagcaggcagaggggtggagtgtgtccagaagtttgtactagcctggatcgctagccaagtccagccgctttaactgagccctggcaatcaaaacaccactgaggatgaaggaagcaaaagaaaagatcaaataaaaattaaatgctccattctgggaaatcagcaggtcatagattctttccctaataggaaatccattactagtcaaatactccaccagagaaaccactccgagtgcaggaaacagatgcactcctcattcccacagccctggtttccaagccctgggtggtttctctttgtgattccattagaaagggcacagcaatatcacagcactggtggaagggtcggcactgccgctccaccgcgggaagctgaaacaccagcctggatctctcttccatgtgctgaaatgcagtaggaacaccgcggggggcaaagacccccctgagctcagcagaggcccctctatgaggtgcccaaggggtggtttgtatctgtgggggctcagcagggactgtgagaaacaaggttatagcaagctaccagctggaaactaacacaagggtgacacgcggaaatgatcaactgttggggggggaatctggtcccctcagagatgccagccctggctcccggactgggactccagtcttgggggcagatggacgggctgaagatagcagagatgctccgaggagcaggcctgggagaacagtgtagagtgtgtgtttgtacacttggggcacaaacttaccccgtgtgtgtccctaccctctgagcccttctgcccctggccagttcccagtgtgtccccatcccctgccatctctcctccaggatcctttctctccctcccctcccaaacgaccacatatttaagacctagaaaaggatcttaaatatcacaacactcagggccctttctccctcctcactgtcccagcagggtcccagttccctggaaacccaggtgcccaccctcttatttgacctcaggacctcctcccacataatactggcttcccgccaagtctctgtcccccttccccagtcaggcctcagttccccaccaacctcggtttccgcccctccctggggtaacctcccaggtctctgtcttctctcctccaccccacatcaggggtcaggttcccacccctactccacaccccaccccaggtctctgcccctgcctgctaggtaccctcccaggtctctgccttctctcctacccccaccatcaggggtcagtgccctccacactcgaatgttgctgccccctgcccagtcgggaaacttcccaggtctctgccttctcctcctccagcaatcggggattaacgcccctctgcccttcccctcctcctgcccagccagacaccctcccaggtctgaattctctccccctaccagcaatcggggtcagctccgctctagctctccccctgtccagccagacaccctcccaggtttctgtcttctctcttacccccatcaggggccaattcctcacccctcgactgtggcttcctcctgcccagccaggaaccctcgctgatctctgttttctcctcccctacaagtaatcgggggtcagctaccctctgtccatccccctgcccggccaggcaccctcccaggtctgtgtcttctcctccccccgcaatcgggggtcaatgcccctctgcccttcccctcctcctgcccagccagacaccctcctaggtctgtgtcttctcttcccctaccagcaatcaggggtcagctcccctctgcccatccccacccactccccggccaggcacctcccaggtctcctccctgcattgggtcagttccgtcccctcccctcctcggtcagaccacccaccccccgcccgggtctgtcccctctcgctgccctcctcgtggcgcccccatcaggggctgacccccccgaccccgcacaggcccaggcccaaacccaggccccctcccacttcaggagccccctcccgctcccgccgacagacaccgttggctgcagagacgtctcagccggagccccggagcccgcatcccgcccggtgcctaacctgaggccgccccgcctgcttctcccggcgccgcggcttccctcaggccggggttccaggttggggctgggactggggccgggccgggcgcacgcggcgggagaaggggtaggcggggtcccggccaggctgcaggggccgggactggcgggggctggcgcggcggggcagttacctgtactgcgggccgccgccctgcgcgaagtcgaaatactgactcgtcgccatcttggcgtcttccccgagcctggcggacccgcgacgtcacccgccccgcccccgagccgcgtgccgctcgcgcctggccacgcgccccaagctccgccccctgcgcgaagccctcaccttctcgcttccttctcttaggctagggagacaccgccccgcgaccacacctgccccgaggccccgcctcctacgcagagccccgccctcctcttaaccactcaaatgtggaggtctctgctcaagccccgcccatgctagaagccctgcctctttctcggagccccacattccctttaaccactcagatgtggtggtatctgatcaagtcccgcccatgctacaagccccgcctcttactcagagccctgccttccctttacccactcagatgtgatctctgctcaacccccacccatgccacaagccccgcctttttttggaaccgtaccttccctttaaccattcaggtgtggaggtctctgctcaagccccacccatgccacaagccccgcctctttctcggagccccgccttccctttacctgctcagatatggtctctgcacaagccctacctctgtctccgagccccaccttctctttaaccactcagatgtggaggtctctgctcaagccccaccaccaccacagccagctaatttttaaattttttgtagagacagtgtcttgctatgttgcccaggctgatgttgaactcctggcctcaaataatcttgccttggcctccaaaagtgctgggattacagacgtgagccactgcatctagcctcagaatgactcttcagaaggcccccatggtctctgcctcctgtgttcacaacgtgatataaataaatgataggccgggcacagtggctcacgtctgtaatcccaacattttgagaggcggaggcaggaggatcttgagccctaggactttgagactagcctgggcaacatagcaagaccctgtttctacaatttttttttaattagctggtcatggtggtacatgcctgtggtcccagctactcaggaggctaaggtgggaggatcacttgagcctgggctgtcaaggctgcagtgatctgtgactgtaccactgcactccagagtgagaccctgtctcaaaaaagagaaaagaaagaaagggctgggcgtggtggctcacgcctgtaatcccagcactttgggaaggcgaggtgggcagctcacccaaggtcaggagttcaagagcagcctagccaacatggcaaaaccctgtctctactaaaaatacaaaaaaaaaaattagccaggcgtggtggggcacacctgtaatcccagctactcgggaggctgaggcaggagaattacctaacccaggaggtggaggatgcagcgagccgagatcacaccactgtactccagcctgggcaacagagcaatacaccgtctcaaaaaaataaaaaaataaaaaataaaaaaataaataaataaataataaaagaggagagggagaggagcagggagggagggaagggaaggaaagaagagagagagagagagagagagaaagaattgaatgaataaacaaataaatggaggcaaacagacaaatctcttatgcagaagaattcctaatttgtgtagctacactgcgcttaaggagatagagagtaactctacacctcttgagtgtgggttgtgcatagtgacttccttcccaagactgcagcctggaaggagggggagggagagtcacttgacagtattgaaacctgacaagcagcagcgtgtttggcggtcccgcggatccgtctcttgcttccacagtgtttggatggaacagatccgggaactcacttccagcctccgaccacccgctgatttcctctcttcttgcaacctccaggagcatcggctcagccatctcctgcttctcggaccaaccaacgccgtttttttggttagctccttcttgccgaccaaccatgagctcccagattcgtcagaattattccaccgcggtggaggcagccgtcaaccgcctggtcagtttgcacctgcgggcctcctacacctcctccctctgcgggtttttttttttttttttttgcttgttttttttttgagacggagtctggctctgtcgcccaggctggagtgcagtggtgcgatctctgctcactgcaagctccgcctcctaggttcacgccattctcccgcctcagcctcccgagtagctgggactacaggcgcccaccaccacgcctggctaatttttttgtatttttagtagagacggggtttcaccgtgttagccaggatggtctcgatctcccgacctcatgatccgcctgcctcggcctcccaaagtgctgggattacaggcgtgagccatcgtctgcgcttctatttcgatcaccaagatgtggctccggaatgcggggcttacttcttccatgaattggccaaggagaagcgcaagggtgttgagcgtctcctgaagatgcaaaaccagcgtggtggccctgctgtcttccaggacatcctgaagccaggtcaagatgagtggggtaaaaccctggaagccatggaagccgccatggccccggggaaaaatctcaaccagagtcttttggatcttcatgcactgggttccgcccctacagacccccatctctgtgacttcctggagagtcacttccgagatgaggaagtgggctgcacgcggtggctcacacctgtaatccctgcactttgggagaccgaggcaggcagatcacctgaggtcaggagtttgagaccagcctggccaacatggcgaaactccagttcttctaaaaatacaaaaattagccgggcgtggtgagctactcaagaggctgaggcatgagaatcgcttgaacccaagaggcaggggatgcagtgagccgagatcacgctactgcactccagcctggggaatagagtgaggctctccaaaaaaaaaagaagaagaagatgggtgaccacctgaccaacctccacaggctggccggcccggaagctggggggcccagaggctgggctgcatgagtatctcttagaaaagccgactctcaaacacggctaggaacctactgagcccagcgacttctgaagggccccacgtaaagtaacggggcttctgcctaagcctttccctccattcactaggcagcttttttgtttatttgtttgttggtttgttttgttttgttttgagaaggaatctcgctctgtcgctggagtgcaatagcacaatttcagctcactgcaacctccgcctcccaggctttggcgatcctccaacctcagcctcccgagtagctgggattactggcatgcgccaccacacccggctaatttttgtatttttagtagagacggggtttcaccatgttggccaggctggtatcaaactcctgagctcaggtgatccacccgcctcggtctcccaaagtgctgggattataggcgtgagccactgcgcctggctttgttatagcaccctgaacagactaagacgcccactttgaacactagattccaaaaagcatcatagaagtcttgggcttctgttagataggcatggtggcaggtgcctgtggtcccagctactcaggaggctgaggcgggaggatcacttgagcccaggaggcagaggttacagtgagccaagatctcaccactgcactccagcctgggtgacagagccagacccccgtctcaaaacaaacaaacaaacaaaaaacataaaaggggcctggcgcagtggctcatgcctgtaatcccagcactttgggaggctgaggcgggcggatcacctgaggtcacgagttcaagacgagcctggtcaacatggtgaaaccctgtctctactaaaaaatacaaaaattagccaggcaaggtggcgggtgactgtagtcccagctactcgggaggccaaggcaggagaattgcttgaacctgggaggcagatgttgcagtgagccgagatcgcgccactgcactccagcccaggtgacggagtgagactcagtctcaaaacaaaacaaaacaaacaaaaaaggaagtcttgggtcttgggcatctatgaacttttgctttgctgaagtctttcaaatcagttggctttttgacaatggagtattacgagagcattaaagtaagaagtgcattcagcagatacagggctactaattcttggacaggctccatggagagcccagggtgctgagggaagccacatttggtgatttagcggatggcactcttccatctgtaactccatgaccatgtgtggccaccaggaatggtctggtgggtctggccagtgcagctctccctgccatgccctggctaaagtccaacaaggtaattaattgcacacggcctctctccaagtccctgccgttctaattaggtaatgaaggctgtgtctctttacaaaggatctgttgtagtgttttctctgggttgcattttttctattatttactgcaaggattgtgctaaatgctttacatgcaaaatgtgatctagttcccacaacagccttcagaaggccgggcatggtggcttacacctgtaatcccagcactttgggaggccgaggttgggagttcaagaccagcctggctaacatagtgaaaccctgtctctattaaaaatacaaaaaaattagctgggcgtggtggtagttgcctataatcccagctactcaggaggctgaggcaggagaactgcttgaacctggagggcagaggttgcagtgagttgagatcacaccactgcactccagcctgggtgaaagagtgaaactctgtctcaaaacaaaaaaaaaaccaaaaaaaaaaaaaacagccttcagaagtagaaacaggcatagtggctcataccagtaaccccagctacttcggaggccaaggcaggaggattgcttgagcccaggagtttgagaccagtctgggcaacatagggagaccccatctctacaaaatacaaaaattagctggatgtggttgtgtgtgcctgtagtcctagccacttaggaggctgaggtgggaggatcgcttgagcccaggaggtggaggctgcagtgagccataagtgtaccactgcattccagtctgggtgacacagcaagacccagtctaaaaaaaaagaaagaaagaaaagaaaagaaaaaagaggccaggcgtggtggctcacacctataatcccagcactttgggaggccaaggcaggcagatcatgaggtcaggagatggagaccatcctggctaacacagtgaaaccccgtctctactaaaaatacaaaaaaattagcaaggcatggtggcacctgtagtcccagctactcgggaggctgaggcagaagaatggcatgaacccgggaggcggagcttgcagtgagccgagattgcaccactgcactccagcctgggcgacacagcaagactccgtcccccaaaaaaaaaaaaaaaagaagtagacacagtcgattctcattaattctgttctctaaagtcaataccaagctcactaatactgaccatcgctcctaagagaaacacgaggttgagttcctgtgagcctctagtcacagtgtttgcatcaaccatcaatacacgacctcggccagtgcagtggctcacgcctgtaatcccagcactttgagaggatgaggagggcggatcaactgaggtcaggagttcgagacccgcctgaccaacatctctactaaaaatacaaaattcgccaggagtggtggtgcatgcctgtaatctcagctactcaggaggctgaggcaggagaatcactttaacccaggacgtggaggttgcagtgagctgagattgcgtcattgcactccaacctgggcaataagagcgaaactccgtctcaaaaaaaaaaaaaaagaaaaaaaagaaagttcaaatgtctagccaaccgggattagttcagattgtgtgacccgaccccggccaatggggaaagggcacaggggcaggacttgcctcaggaataaaggctctcatgcccctttgttcaggtgcgctctcatgacgactggacaaagaaaaacacctctctgcgcagaagtaaaattgctttgctaaaatccctttgtttgtgtattcaatcttcttaggattttgagcgttattcccaacaaatagacatggttgattcattcacattgaactcatagcacttttactcatatctgaagttctctaacacactgcttttcttcttggagctttctttttttttttttttgagatggagtcttgctctgttgcccaggccagactgaagtggcgcgatcttggctcactgcaagctccgcctcccgggttcacgccattctcctgcctcagcctcccgagtagctgggaccacaggcgcccgccaccacgcccggctaattttttgtatttttagtagagacggggtattgccgtgttagccaggctggtctcgatgtcctgaccttgtgatccgcccacctcagcctcccaaagtgctgggattacaggcgtgagccaccgcgcccggcctctccttggagctttcttgcacttaggaagactagacagtgcttcagcatgaagcttggaagtcattttattttatggatttatttatttatttttgagacagagtcttgctctttcacccaggctggagtgcagtggcgcagtctcagctcactgcaacctccgcctccctggttcaagcaattctcctgcctcagcctcctgaatagctgggattgcaggcgcgtgccaccacgcccggctaatttttgtatttttagtacagacggggtttcaccatgttggccaggctggtcttgaacttctgacctcctgaccacccactttggcctcccaaagtgctgggattatacgcgtgagccacattgcctggcctgtatcaagcattcttttagggcagaatttttcttgctcagtaccgtggacattgggaccagattattctctggggcggagccatcctgggcactgcagggtgctgagcagcgtccctggcccccatccactccataacaggagtatcccccagtcgcaacaaacacaagtgtccccagaaatcgtccggtgtccgctgcgggcaggatcaccacccccccaggtgacagccactggtgtaggggttaaagatacagggtgacaggccgggattacacctgtaatcccagcactgagcccagcactcctggcctcaagtgatccacccgcctcagactcccaaagtgctgggattacaggtgtgagccactgcacccagcccacaagaaaattttctacaagctcaccttcagaaaagtttcaagatcctacaaaatctagcccttttgtgcatttccaaacgaattcctcagggatggccggcagaataatggcccctaaagatatccacacccactgggtgtggtatgtttgcctgggaaaaatagtgagaccccatctctacaaaaaattgtcaaattaaccaagtgtgatggcatacacctgtagtcccagctgccagggaggctgagataggaggatcacttgagcccaggaggttgaggctgcagtgagccatgatcacacccccgcactccagcctgggctacagagcaagaacctgtctcaaaaaaattaaattaaattaaaatttttccattttaaaattaaaataaaacgaaatgaaaacagacagaggccagctgcagtggctcacacctgtgatcacagcactttgggaggccaaggtaagcggatcacctgaggtcaggagtttgagaccagcctggccaacatggtgaaaccccgtctctactaaaaatacaaaaattagcctggcgtggtggtgggtgcctgtaatcccagctactcgggaggctgaggcagaaaaatcgcctgaacctgggaggtagaggttgcagtgagccgagatcgcaccagcctgggtgacagagcaagcctctgtctcaaagggaaaaaaaaacagggaaccaagcttaggtcacacgctgtggctcctcggtggtggctgtagcaccatggacagctcccaggctttggtggactggggagaagctgttgctctttaaatgccagtctgggcaggcctgtctgtccagaatatgccttcctccctcttttttattcatctaactccactcactcctcaggggtctcactcatgcagtcgccacctctgtgccccaccaggaaacctccccaacggtcccccaacctgcaccactccaaagatgtctctagatcagcccagactctgttgtccacctgtttctctcaactgaatgggaattatttattttttttttttttgagatggagtctcactctgtcaccccacctggaatgcagtggctcaatctgggctcactgcaacctccacctcccgggttcaagcgattctcctgcctcagtctcccgagtagctggaattacaggcgcccaccgccacgtctgaccaatttttgtatttttagtagaggcggggtttcaccatgttgtccaggctggtctcaaacccccaacctcaagttatctgcccgcctcagcctcccaaagtgctgagattacaggtgtgagcggcctcccaaagtgctgggattacatgcctggcctcaactgaatggtcattctaagagaattcccaatcctgcacacaaaaacagcataaattaactgaattagggaagccacgcctctgccagccgtgagctgggaagaagcagatacctcagaggcagggagcgcaggcgggtgatgatgagaggggccacagccgcagccccacgcaggggagcccaccactaaccctgcacccccacccctgcacaaaagagctggtgggcactagccatatcgccttgcaaccttcctcggatgcagaatccactccttcaggcatcctcttcctccaatgctctgaaggcctggggagcctgagagatgcccgctgcacccaggcagggctcgcctttgtttgccagtaatgggaattactcatatcttgtgcccagtgcccagcacagggactcatcgaatccacccctcagttaacacaagtgtctcttacaagacctccattttctccagccaggagatgggaagtcccaaccttgtgctaaagtctctggggcctctgcttccccatcagggctttctgcctctgctgtgggcaggttacctttatgcctcggaagagtgcagacctccatgcagcgggtgaggctgccagcctaggtggggtgtcattgaatgtcatgaagggagccagccttcatgcactctgcctgcgtctcctgaacagctttggaccaggagttgctaccttgtgcggagaacgtgtggtgcataagaacaaccgagcctctgctcttcgaaaatgtatattctggccaggtgcggtggctcacgcctgtaatcccaacactttgggaggccaaggtgggcaggttgcctgaggtcaggagtttaagaccagcctggccaacatggtgaaaccccgtttctaccaaaaataaaaaaaatagctgggtgtggtggtgcatgcctgtagtcccagatgcttgggaggctgaggcatgagaatcgcttgaacctgagaggaggaggaggttgcggtgagctgagatcacaccactgcactccagcctgggaaacagagcaagtctctgtctcaaaacaaaacaaaacaaaacaaaacccagtatattctaataaggaggagcagagaatcaacaacaacaacaaaaaagtgtaaataatttcaattaatagtaagtgctgtgggtcaggcacggtggctcacacctataatcccaacatttttcgaggctgagatgagaggctcacttgagcccaagaattcaagaccagcctgggcaatagagagataccctatttctacaaaaattacacagattagcagggcgtggtggtaggagcctgtagtctcaaccactggagagaaagaggtgtaaggatcacctgagcccgggagttcaagactgcagcgagctgtgattgtgccattgcactccagcctggatgacagggaaaactcctgtttcttaaaaaaataagtaaataaaataaacattaaaaacagcaatagcaagaaatacatataggccgagcacagtgattcgcacctctaatcccagcactttgggaggccaaggtgggcggatcacctgaagtcaggagttcgagaccagcctggccaacatgttgaaaccccgcctctactaaaaatacaaaaaaaaaattagccaggtgtggtggtgtgtgcctgtaatcccagctacttgggaggctgagggaggagaaccacttgaacctgggagtcggaggttgcagtgagccaagatcgcaccactgtactccagcctggcaacagagcgagactccacctaaaaaaaaaaaaaaaagaaagaaagaaagaaagaaagaaagaaagaaagaaagaaagaaagaaagaaagaaagagaaagaaacacatagggagcttttcttgtgccccagcactgtgtttagtgctgtctatgcattatctcataatgtggaaaagccatagcggctccatttcacagatgagaaaaactgaggcccgcaggtgagatcactcatgcccactggtctgccagctggggagtggctgggctagagttcaaacccacttccagtccgactgcacggcctgcactctccaccctaccatcttccacagtctccttgaattcctccagggcgaggccacgccagcgcacaactgcagggggcgccgttcccacagcagccctgcaaagtgagtgtgcctgagaaacttccgcctcccctgcacccagccctgtttagggcacgaggctgaatcaatggtaagtgaccatctaatggacccacaacacggtgacctggggacagtcatttctttctttttttttttttttctttgagacagagtctccctctgccgcccaggctgcagtgcagtggcgccatctcggctcactgcaacctccgcctcccaggttcaagcgattctcctgcctcagcctcccgagtagctgggattacaggcgcacgccaccacgcctggctaatttttgtattttcagtagaaacggggtttcaccatgttggccaggctggtatcgaactcctgacttcaggtgatcctccctcctcggcctccgaaagtgctgggattacaggcgtgagccatggcatccgacctggggacagtcatttctttgcctgcacagactttttgggggatgccacccctcacccctgctccctttgcaaggagaagtgccaagaagacctttcccaactcccccaccccccattctctaaggaatgaggccatcttgccatttatttatttatttgtccgttgttttgtttttaaatctctgatgcgccatcagaaaattatttctgcctctgcccctggcgtggctttcggagatgcttgtctgtcagccaatggggaggatcggattctggcagggggctgtgcttttccgtcaggccgccaccccccaccccctcctccctgcacacaaaagcagcataaattaaccgtcttcgggaagccgagcctctgccagccctgagctgggaagaagcagctacctcggaggcagggcgcgcaggcgggcggcgatgagagggggcgcagccgcagccccgcgctggggagcccaccgctaaccctgcaccccacccacccctgcacaaaagagctggcgggcgctggccacgtcgccctgggtgaccttcctcggatgcagaatccgcccctgcgagcatcctcttcctcctaggctctgaaggcccggggagcgtgagcgatgcccagctgcacccgggcagggctcgcctttgtttgccagtaaggaggagaggctgtctcagctgcagaggtgagtgcgcgcatctccccttctcccaggataaaccgtctccctggaaggtttatccggcagcctttgccgcctctaaatccctttccagcagatggggcgggtgggagcagagagccacggtcttgtgactccgtgaaggccctcacatccctgttcccggtaccagggaaaaccgttccctgagctgcgcccagcaacacagtttaccttccgcgcgcaccgttcccctctaagtgcaccattttcaggacacgctgagagctcgggcggatgaaaacctcagcttctctctgggacgctgaaatagacccatcctagccctatgtatttcctatttataacgctaggaaggccaccagccgacgatttcgggaaaaaaaaaaaaaaaaaatctaagtgtgtcgataaaggctgtcctgtggggtggggaggaagggggtggtttatggtttaagacacagatgcctcctccttattggaactcgtatgtgatttgttaataatcagacatcagggctcaaatgagcgcttcactcccgttccttgatgtcactgtcttcttttggccgtccccaaatgcgaagccaggatctgagtgcaggagtgtccggggcccactgaggacccaccccaccccatccttagaagactgtggagtcaacgcctgtggctgcagctggcagggggtgggggtcgggggcggggctggtgggagtgttcctgggggctgaggtcacacccagctcagtataaggaagggagaggcgaagaccccttcctccggagagcaaatgcgtttctactgccgaggagaacttaccctcgcgggaagggcctggctggctgctgccaccgccccccccccgaccccatagcatccaggagggattttttttttttccatgctgcgtgttactgtccctcctccaagcatgaatgacgacattgaggacagagaatcgagtgagaaacgctcaccctgtacgggggagggtctagttttagccgtcccctccccccacttcctcatctggctgaggctgcctctgggtccttccttgctaagccacagtcccctgtccccgatgcaaacccgatatctatgctggggggctgcaggtaacctactccacagagaggcagcctggatgccatgagagttgggggccttagatgcttcatgtatttggtttttttgagacagggtcttgctatcttgcccgggctggtcttaacctcctgtgctcaggcgatcctcgcaaagtgctgggattacacgtgtgagccactgcccccagccagatgctttatcttttattttattttttgaagtagggtctctgttgctcaggctggaaagcagtggcatgatcatagctcactgcagtctcgacctcctggtctcaagcgatcctccaacttcagcctcctgaatagctgggacttcaggcaccaggcacccatcaccatgtttggttaatttttgtatttttttttttttaagagatggggacttgctatgttgcccaggctggtcttgaccttccaggctcaagcgatcctcctatctcagcctcccaaagtgctggggattacaggtgtgagccaccgcaccagccagatgccttattttattttattttattttctgaaatagaacctcactctgttgctcaggctggaatgtggtggcacaatcatacctcactgcagcctccacctcctgggctcaggcaatcctcccacctcagcctcctgaacagctgtgacttcaggcacccaccaaatttaattaatttttgtttttgtttttgcttttcgtagagatggtgtcttgctatgttgcccaggctggtcttgaccttctgggctcaatcctcccacctcagcctcctgaatagctaagacctcaggcacccaccattgtgcttggttagtttttgtattttttttttgagagatggggtcttgctgtgttgcccaggctggtctcgaacccctggtctcaagtgatctgcccaaagtgctggaattccaggcatgcaccactgcacccagcccctagacgctttaaaaagtggatctagtggcccggcagggtggctcacacctgtaatcccagcactttgggaggcaggtggatcatgaggtcaggagttcgagaccagcctggccaatatagtgaaaccccatctctactaaaaatacaaaaattagctggacgtggtggcacgcgcctgtagtccaagctactcaagaggtggaggttgcagtgagccgagatcgcaccactgcactctagcctgggcgacagagcgagactctgtctcaaaaaaaaaatgacaacaaaaaaagtggatctagctactcggaagctgttgagagacagacagaggtaatggaaggacagagtgtacaatactctataatgactgccggacacaggcctgaaatcctttcgcaaacacgggaatgcacacagaaatgactattgcctttaagacaaggtttctccaccttggatctatggatatttgggacccagtcattcttggtcatgggcggccatcctgggcactgtaaggtgctgagcagcacccctggcctgcccagggggcactccttcccctcagttgtgacaaaagtgcctctagacaatgccaagtgtccccttgcagcaggggaggcagaattgtccacaggtgcaaagcactggtttcaaagcccaaaacagatggggttggttgagtcataagatgctggtatgttatgtccaaaaggtatcttagaggtcatctctaattcaactcttttgtttacagaaagggaaactgagacccagagagggagatggtctgagagtctgccatgccccagagcagaccacaactcagtctcacctggcagctctgatcctggcccccacccagactgctcccccctgccctgcccctgcccctgcccccagtgagctcctcagaacaagaaaaacaaaactggtgtggggggtggggcggcacagtggctcacacctgtaatcccagcgctctgggaggctgaggcaagaggatcacctgagcccgaaagttcaagaccagcctgggtgacataccaagatcagagaaattagccaggcatgatggcacacactcgtggtcccagatacttgggaggctgaggcaggaggatcgcttgagcccaggagttggaggctgtagtgagctgggatcacaccactgcactccagcctgggcgacagagcaagaccccgtctctaaataaataaataaataaataaagtggcattttgtggtagtaaagatgagggtctcctttctaaccccagtctctttccacactgccttagtgagccctggagtcagaaagtcactaggacttgcttgagggaggacagagaggcaggacaggtggcctggtacatatggcagatagcgatgggttagagcctactggattctctttgaacttggcattcccagcacggaagctgaagtatatcagccattcacactttagtatgaatgactgtttggatttcttgctttctagttgaggtccaaggcacaagagggagggtaagtctatctgggtcatggctcaccctggagaaggtagatttcgaagtttccaagggagcaggacttgtatctgaaggctcagcctctcgcccacgttcaaactctgaaccccactgtgcatcctaagctctctgtgcctctgttttctcatctgtaaaacaggggaacctcatggggctcggtgatggttcaataagaagtgctggccgggcacagtggtttacccttgtaatctcagcgcttagagaggccgaggcaggaggattgcttgagcccaagagtttgagaccaccctggccaacatagcaagacccaatctcttaaaaaaagattttaaaaaattacccaggcatgatggtacacacctgtggtcacagctactggtggggggctgaggcaggaggattgcttaagcccaggagttcaaggctgccatgagccatgattgtgcccctgcactccagcccaggcaacagagcaagatcatgtttttttttttaaaaaaaaaaaaaaaaaaaaaaaaaacagccaagctcagtggctcacccctgtaatcccagcactttgggaggctgaggcgggtagaccgcttgagctcaggagtttgagaccagcctggccaacacagtgaaaccccgtctctattaaaaatacaaaaattagccgggtgtgatggctcaagcctgtaatcccagcactttgggaggccaaggcaggaggatcacctgaggtcaggagttcgagaccagcctggccaacatggcgaaaccctgtctctactaaaaatacaagaattaaccaggcgtggtgatgggtgcctgtaaccccagctacttgggaggctgaggcgggagaatcgcttgagcctggaaggtggatgttgcagtgagctgagatggcaccattgcactacagcctgggcaacagagcaagactccgtctcaaaaaagaagaagaagaaggagaaggagagaggagaggagaaaggagagagggggaggggaagggggagggggagacggagggggagtgggagggggaagagctgcatggggtagacgattgtcattaggactattgtccagtaaaacccattcctctgcggcttcctttcaggggtcatccctgcttcaagccagtgcctcttcccagctcccatggggaccaccgaagccacgctccggatggaaaacgtggacgtgaaggaggaatggcaggacgaagatcttcccaggtaggacttccacatccctgagtcaaccgttgggggagcaggtgtctctcccaggtgggacacaggagcggcccgggtctctctctaagtgggaaccgcccggggctggcctggttccatctccgcgtcctcctctcccgcacactctgggaggcctgaggccctgtgtgcgagtcttctctgtggcctcacagtggggtagtcctggccaggcacataatgggtatttgctcaatgatttaagattcatttctgtcttccctgccccaaagctccaaaggaccccccacccctacaccattttaagagttcttaacattctggctgggcgcggcggttcacgcctgtaatcccagcactttgggaggccgaggtgggcggatcacttgaggtcaggagttcgagaccagcctggccaacatggcaaaaccgcgtctctactaaaactacaaaaattagctgggcatgccgggcgcagtgactcatgcctgtaatcccagcactttgggaggccgaggcgggcggatcatgaggtcagcagatggaaactatcctggctaacatggtgaaactccatctctactaaaaatacaaaaattagccgggtgtgtggcaggcgcctgtagtcccagctactcgggaggctgaggcaggagaatggcgtgaacccaggaggcggagcttgcagtgagccgagatcgcgccactgcactccagcctgggcgacaggtgagactccatctcaaaagaaaaaaaaaaaaattagctgggtatggtgtcatgcgcctataattccagctactcgggaggctgaggcaccatggtgatttattagcagcctttaggagacacttacctcccctaacatgctgaacttttttttttttttttttgagtctcactctgtcccacaggctggagtgcagtggcacgatctcaggtcactgcaacctccaggtcctgggttccagtgattctccttcctcatgcccccgagtagcttggattacaggcacccgccaccacatctggctgatttttctatttttagtagagaccggatttcaccatgttggccaggccagtctcgaactccgaaagtgcttggattccaggcaagagccaccgcgcccggcccctacgctgaacattttgcagggacatcttgtctacactctgtctccccaccacacggagcgccacaagagcaggggtctttgtttagctcactgctgtatcccaacctaaggatagtgcctggcatacagtcggcgcttaacaaatattgggtgacaggtgctgatcactggtcagaataagaaatcacaggggctgggcacggtggctcacgcctatgatcccagcacttacagaggctcaggctggggggattgatagagctcaagagttcgaaaccagcctgggcaagatagtgagaccccatttctaccaaaaaaaaaaaaattagctgggcatggtggtgtgcacctgcagtcttagctacttggcaggctgagacaggaggatcccttgagcccagaaggcagaggttgcagcgagccatgattgcagccctgcactccagtctgggtgacagagcgagactctgtctctattttattttattttttttattttatttatttatttatttatttttgagacagagtgtcgctttgtcgcccaggctggagtgcagtggcgcgatcttggctcactgcaagctccgcctcccgggttcacgccattctcctgcctcagcctcccgagtagctgggactacgggcacccgccaccacgcccggctaattttttgtatttttagtagagacggggtttcaccatgttagccaggatggtctcgatcgtctgacctcgtgatccgcccacctcggcctcccaaagtgctgggattacaggcgtgagccatcgcgccctaccacctgtctctatttaaaaagagaggaaaaaaaaaaaaaaggccggtcgctgtggctcaggtgtgtgtaatcccagcactttgggaggccaaggtgggcagatcacaaggtcaggaatttgagaccagcctggccgacatagtgaaaccctgtctctactaaaaataaaaattaaaaaaaattagctgggcatggtggtgcacgcctgtaatccccagtactcgggaggctgaggcaggagaatcacttgaacccgggaggcagaggttgcagtgagccgagatgtgccaccgcactccagcccgggtgacagtgtgagactccgtctcaaaaaaaaaaaaatactacatggaaaggaagctgtgcgaatttgctgttgagacgtgtgactctgatttgctggctaaagatagctgctcatccctcttccctttcagaaccaggaattcatccatcccccaaacacaatgcccaagggtcagttatagaaactattgggtgaggttcagtcaaaaagaccaggtgtgttccgcctgaaaaagagaattggaaaagaatctccaggccgcgcacagtggctcacgtctgcagtcccaacagtttgggaggccgaggcgggcaaatcacttgaggtcaggagttcgaggccagcctggacaacatggtgaaaccccgtctctactaaaaatacaaaaattagtcgggcgtggtggtgggcacctgtaatcccagctactcaggaggctgaggcaggaaaactgctggaactcgggaggcgaaggttgcagtgagccgagatcgcgccactggactccagcccgggcagtagagtgagtgagagtgtctcaaaaaaacagaatctccagttccaggaaaatttcaatctgagagggttccggagggcagaacgaggccaaaagaacgaacttaaaagagaatggggtttgaaggagatacagaagaatgccttgaagtaatcggtctccttcaaaatgagtcaggctggtgtgggaggccgagagcttccttcccattcatgtccaggcagaaggaggactgttgaagacggcatcttgatattcaagaacttcagccctctcctgaatccagtcattgccaggcctctaaggcccatgcacctgtctgtgtttctttgcagcaggaggtccctgttctcagaatagccgagaatcagagaatcacggctgggagcggaggctgatgtctgtaatcccagctctttgggaggccaaggcgggaggatcgcttgagcccaggagtttgagattagcctgggcaacatagcaagacctcgtctcttaaaaaaacaaaaaacaaacaaaaactggctgggcctagtggctcacacctataatcctagcactttgggaagccaaggctggcagatcacctgaggtcaggagtttgagaccagcctgaccaacatggagaaaccccgtctctactaaaaatacaaaattagccgggcgtggtggcccatgcctgtaataccagctactcgggaagctgaggaaggagaatcgcttgaacgcgggaggcggaggttgcagtgagccaagatcgcaccactgaactccagcctgggcgacagagtgagactccgtctcaaaataaataaataaaaataaaaaataaaaaaaaattagtcaggtatgctggtgtgcacctgtagtttcagctactcaggaggctgaggcaggaggattgtttggacttgggacatcgcagcagtgagctatgatcacaccaccgcactccagcctggacaacagagcaagactgcatatctaagaaaaataataataattttaaaataatgtcatttcaagcagcacagcataaacaaaggcgcataagctttggaatcggacgcccatggttcaaatcccaattccccagcaggtttgctctgccacctgggctacctctttgggcatctcagtgcctctgttttctgatctgtaaaataggacaataatctctcgcgcaccaggtggtcatgaaattttgataaaacagccgagatgggctgtgcaaatggcgaaggcagcacaaataaataatcatctccagcgttattactattattagcttagctccctttccccctactgatttttttttatttctttacttttcttttctttttttttttttgagacagagtctcgctctgtcacccaggctggggtgcagtggcgccatctcagctcactgcaacctccacctcctgggttcaagtgattctcctgcttcagcctcccaagtagctggattacaggcatctgccaccacgcccagctcatctttgtatttttagtagagacgaggtttcaccgtgttggccaggctggtctcgaactctcaacctcaggtgatctgcccacctcccaaagtgctaggattacaggtgtgagccattgggcccagctccacctataattttttttttttttttttttttttttttttttgcagacaaagtctcactctgtcacctaagctggagtgcagtggcgcgagttcggctcactgcaacctccacctcccgggttcaagcaattctcccacctcagcctcccgagtagctgggattacaggcacacaccaccacacccagctaatttttgtatttttggtagagacggggtttcaccatgttggccaggctggtctcgaactcccaacctcaagtgatccgcctacctcggtctcccaaagtgctgggattacaggcgcaagccaccacacccggcctccaccgataattttaaaagctctcatctcacccaagccttcttgagacaaaaaccaaggccgagcgcacctgcaaatgcaagctggaggccctttctggaaggcgcgaggccagcgggagcgggaggagggtgtgtttctggtggatttcttacagctgcaaggcttctcgcccacccgctgcagcagctttgtgtttgcaggacagtggcctcgctgtgccagcctggcccccacgagctacgcctttgccaacaggacacttcctccacgaggcttctgtcttcctcgtctctggaagaactgagtcggctcctcggtgcaggtccagctgcggccacacataaccacctctgtctgccgcaaaacagctcacaattctgtttcttccagcccagccatcccctcccctggggactgcagaagtggtctttgtactgcccttaagggtgtcagacagagccctgcatggcctctgcccttctagcacttttttttttttttttggagacagagtctcagtgtatcacccaggctggagtgcagtggtgcaacctcagctcactgcaacctccacttcctggtttcgagcaattctcttgcctcagcctcccaagtagctgggattacaggtacgcaccaccatgcctggctcatttttgtattttcgttagagacagggtttcaccatgttggccaggctggtctcgaactcctaacctcaagtgattcgcctgcctcggcctcccaaagtgctgggattacaggtgtgagccacgcgcccggcctccttctagcattttccttcactctcacccttctgcagcctactacggagctagagctgaaggcagcccggagattgctgcctcaatttctccattcattcattctgatgctatgcgccaactgtataccagtcccttatagcctcacaacccaatacaaggtggcagctgggttcatggcacttctgaccaggccagggagggaaggggagctgtgattcttggctgtgaagggtgaggagggatgagccggggaaggaagtggggtgtaggggccccacattccaagcagagagggcagcatgtgcaaaggctctgggctcagtggaagcaggttgagggactggggaaggctgcgtggggaaactgaggacttgggggaggagcttacccagggcatcctagccaaggagggtcagatgcagggtgagctgccccatagctccctctactctcttcccctcacagctgagtggctgccagttttgtttgcttgcttgtaactttttctttgtttgttttgggttttctggggggttttatttatttatttatttgaaacagagtctcgctgcaacgcccaggctggaatgcaatgacgtgacctcggctcgctgcaacctccacttcccaggttccagcaattctcctgcctcagcctcccaaatagctgagtttacaggcgcccaccaccacgcccagctaatttttgtatttttagcagagatggggtttcaccatattggtcaggctggtctcgaactactgacctcaagtgatccacccgcctcagcttcccaaagtgctgggattacaggcgtgagccaccatgcccagctgcttgtaactttttaattttttttttttttccagacggggtcttgctctgtcacccaggctggagtgcagtggtgcgatcatagctcactacagcctccacatcccaggctgaggcgatcctcccactgcagccccctgaatacctgggaccacaggcatatgccaccacacccagctatgttttattttctgtagagacagggtctcactgtgttgcccaggttggtctcaaactcctgggttcaaatgatcctcccacctcagcctcccaaaatgctgggattacaggcatgagccactgcgcctggcctatttgatatacttccaaacttggaaaaaaattacaagaatgatataaagaatatctgcatacctttagtaggattatacaattgttaacattttgctccttttatatcaaagtcagccctcagggctgggtgcggtgactcacatctgtaatcccagcactttgggaggccaaggcaggtggatcacctgaggtcgggagttcaagaccagcctaggccaacatggtgaaaccccgtctctactaaaaatacaaaaatcaactgggtgtggtggcgggcacctgtaatcccagctactggggaggctgaagcaggagaattgcttaaacccaggaggcagaagttgcaatgagcccagattgtgccgccacactctagcctgagcaacacagcaagactctgtctccaaaaaaaaaaatttaccctcaattgtaccgataatgtcccatgtccctatttagctaatgcccctgccccaaaccctgggtccaagacccaatctgggaccactcattgcatcaggttgagtatactgggttgtgtgtttactggggtatgtgtctcaccaggcactgggacttaaacttatctcttttaggggaacacgatccaacccacctcagcaggacgaagccacgctgtgcatcttgcatgtgggggggacccccacttttttttttttttttttttgagacggagacttgctctgtcgcccaggctggagtgcagtagcatgatctcagctcactgcaacctccgcctcctgggttcaagcgactctcctgcctcagcctcccaagtagctgtagctgggaccacaggcatgtgccaccatgccaggctaattttagtatttttagtagagacggggtttcaccatgttggccaggctggtcttgatcgcttgaccttatgatccacctgcctcggcctcgcaaagtgctgggattacaggtgtgagccaccatgcccggctaggatttccactttttacctggattgcccatcatggactttgagagccggctctgcagagggctaagtggatatattataccccagggccacggaggggatctccaagtctggagagtctgcggttctcctggagcttgcggaagtaacaggatctcacctgaccttggaaactgcagctccatgaacaggcggggagagcttgctccacccatgttccagagcagtgggtcttccttcagggagcctggagccctgccaggtcggcttctccagttctgcatgatcttaaacctttcctgaacatccactgcaactggcagctcagcctcaggacctcatcccatccccgaggcactgcctctccctggccctccctccctaccctccatcctccaaccactccctcctcccccactgctctctctgcgccaggcaccctgagtctgctttctgatctgcccttgaacttggcaagcttattccagtcccggagcctgggcctctgcagtgccttccatctggagtgctcttgcctggtctctgcaggacgccaacatcatgcttaaaagtctacacttaaaagtcgcttccagccaggcacagtggctcactcctgtaatcccagcactctgggaggccaaggcgggaggatcacttgagcccaggagttcaagaccagcctgcaagaccccatctgcagaaaaatataaaaattagctgggtggccgggcgcggtggctcacgtctgtaatcccagcactttgggaggccgaggcgggcaggtcacgaggtcaggagatcgagaccatcctggctaacacggtgaaaccccgtctctactaaaaatacaaaaaattagctgggcgtggtggcaggcgcctgtagtcccagctactcgggaggctgaggcaggagaatggcgtgaacccgggaggcggagcttgcagtgacctgagatcgcgccactgcactccagcctgggtgacagagtgagactccgtctcaaaaaaaaaaaaaaaaaaaaattagctggacatagtagtgtgtgctggtagtcccagctacttgagaggctgaggtaggaggattgcttgagcccaagaatttgagaccagcctgggcaacatggcgagaccctgtgtctgcaaaaaaaaaaaaaaaaaaaaactgtaaaaacctgaaaaattaaccaggtgtggcagctcactcctgtaatcccatcactttaggaagctgaggcaggagaattgcttgaaatgtgaagttcaagaccagcctaggcaccacagtaagaccctgtctctacaaaaaattttataattagccgggtgtggtggtgcacacctagggtcccagctactcagaagactgagacaggaggatcccttgagcccaggaatttgaggctgcagtgagctatgatttcactactgtgctctaggctgggcaacagagcaagaccctgtctcaaaaaaaaaaaaaaaaaaaaaaagctgcctcctcaatgaggccttccctgaccaccccacagatttttttctctctctctcctctcctttatttcattcattttctttgccgtaagcatcactatctgccttgttcacttatttgcttattgtcttcctttatatacatggtctcaagccaggaattgctttgcacaatcctgggaaccaccaagtccaaaatccacagggcaggctggaaactgtcaggtaagagctaatgctgcagtttttgtttttgtttttgagacggagtctcactctgtcgccaggctggagtgcaatggcacgatctcagctcactgcaacctccgcttcctgggttcaagccattctcttgcctcagcctcctgagtagctggggttacaggcatgcaccaccacacccagctaatttttgtatttttagtagagatggggtttcaccacgttggccaggctggtctcgaactcctgacctcaggtgatctgcccgcctcggcctcccaaagtgctgggattacaggtgtgagccaccgcgcctggcccccattttagtcatgaggaaaacagaggctcagggaggagaaggcaccacccagactcgtagcgctggatggagtggcagggctgggagttgtgctcagactctctgagactctcttaggcattcccaccctttctcctgctttcctcactttcccagtatgtgcagctgagatgctttctttttttctttcttttcttttcttttttttttttttttttgatagactcttgctctgttgctcaggcgggagtgcagtggtgccaatcacagctcactgcagcctcaaactcccggactcaaacgatcctcctgcctcagcctccttagtagctgggattacaagtgcatgccaccatgcctggctaatatgttgtattttttgtagagatggggtctcactatgttgcccaggctagtctcgaactcctagtctcaagagatcctcccacctcagcctgctgagtagctgggatcacaggcatgagccatcatgctgggctaatttttaaatttttagtagtgatggggtcttgctgtgtgggccaggcttgtcttcaactcttgggcttaagtgatcctccctcctcagcctcccaaagtgctgtgattaccggcatgagcccctgcgcccagtctgagatgctttctacagcttcacatttcagctgcagcccagcagtggtccacctagttcacagccaatgtagaatctgtgtggaccatccaatgttgtgaggttgaatcacatccctttttttttttttttctcgagacagagtctcactctgtcactcaggctggagtgcagtggcacggtctcagctcactgcaacctccacctcccgggttcaagcgattctcttgcctcagcctcccgagtagctgagattacaggcacgtgccaccacacccagctaattttgtgtttttagtagagacggggtttcaccatgttggccaggctggtcttgaactcttggcctcagatgatccacctgcctcggcctcccaaagtgccgggattacaggcatgagcccctgcgcccggcctgagatgctttctacagcttcatatttcagctgcagcccagcaatggtccactcagttcacagcctacgtagagtctgtgtggaccgtccaaggttatgaggctaaatcacatcttgagaatcgaaggcagtgccggctgcaaagcaatggggctttcctctggcgggaggagatggtggctggacagggaccctggctgggcaagtggttgtttgtttgtttgttttgagacggagtctcgctctgttgcccaggctggagtgcagtgtcacgatctcggctcactgcaacctccacctcccaggttcaagcgattctcctgcctcagcctcaccaatagctgggattacaggcgcccgccaccatgcccggctaatttttgtgtttttattagagacagggttttgccatgctgaccaggctggtctcgaactcctgacctcagatgatccacccgcctcagcctcccaaagcgctgggattactgaggcatgagccaccacgcccagccagaaatctagactttttgcatctcttcttcgacagcaaatggaaaatgtttttaaatgctgcatgggtgggacataactaggcttggtgcatcagccatcagcctgcaattttgcagcgctggtttgggttaaccttctgaatgagcaggtcagttcattcttcagtcctttctttgaagtttgctatatatatatatatatatagcaaaatctatatctatatctatatctatatctatctatatcgcctcgctctgtcatccaggctggagtgcagtggctcgatcatggctcactgcagccttgacctcctgggctcagctgatcctcccaccttggcttcccaaatagctgggactacagggacacgccaccatgcctggctttttattttttatagagatggagtctcgctgtgttgcccaggctgatctcaaactcctgggctcaagggatcctcccacctcagcctcccaaagtgctgggattacaagcgtgtgccacctcatgcccagccaaagcttgctttttaaaaaattgaggtgaggccaagtacagtggctcacgcatgtaatctcagcactttgggaggccgaggcaggtggatctcctgagctcaggagttcgagaccagcctggccaacgtggtgaaaccccatctctactaaaaacacaaaaatcagctgagcatggtggtgggcgcctataatcacagctactctggaggctgaggcacaagaatcgcctaaacccgggagatggaggttgcagtgagccaagattgtgccactgcactccagcctgggcaaaagagtgaaactccgtctcaaaaattaaataagtaaaataaaatttaaaaaatataaaaaattgaggtggaattctcataacatgaattcatcattttaaagttcatgattcagtggcagagtccattcataatgttctgcaaccccacatctatctaatttgaagacattttcatcaccgtgagaggaaatcctatctactaagtcagccccattttcatccctctcccccaaccccagtgaccacacatctacttcctgtgagaatttacgtgttctaaacatctcttttttttttcttttcttttctgttttgagcagggtgtcactctttcacctaggctggagtgcagtggtgcaatcatagctcactgcagcctcgacctcccaagttagagcaatcctcctgcctcagcctcctgagtacttggaactagacgtgtaccaccacacccagctaattgttttgtatttttagtagagacgggctttcgccatgttgccccgactggtcttgaactcctgggctcaatgaacccgcccgcatcagcctttcaaagtgctgggattacaggcataagccaccacactcagccaacatttcatgtaattggaatcacacactgtgtggccttttgtgtctggcatctctcactgagcatgatgtcctcaaggtgcatccatgctgtggtctgtgtcagagccctgttccttttcagggctaaatagtattccattgaatggatataccacatttgttgatccagtcagctgttaatggactggtgttgtttgtttgtttgtttgtttttgagacagagtctcactctgtccccaggctggagtgtagtggcgtgacttcagctcactgcaacttccacctcccaggttcaagtgatcctcttgcctcagcctcccaagtagctaggattataggcatgcgccaccatgtccagctaatttttgtatttttagtacagacagggtttcatcgtgttggccaggatggtctcaatctcttggcctcatgatgtgccctcctcggcctcccaaagtgccaggatgacaggcgtgagccaccgcgcctggccgtcaatggactcttgaattgtttccactttttggtttttatgaattatgttcattcaagtatgagttttcgtgtgaacagatgttttcatttcctttgggaatccgctccattttgatctttgccatgaacaggaggagggtgacatctgattcctcctttacctccaagccccatagatgcactggagacgcagtggttacgcaaaaacatttgatgaatagagaaaagagagggagggaaagggagagggaaaaagcataaatagattccgccccaaaaaggttaacagctcatgccctaagtggaacagaaatgagggaataaatctttttttttttttttttttttttgagagagagtctcactttgttgcccaggctggagtgcaatggcacgatctcggctcaccgcaacctccgcctccagggttcaagtgattctcctgcctcagcctccccagtagctgagactgcaagcacgcaccaccacgcccagataatttttgtatttttcagtagagactgggtttcaccattttggccaggctagtcttgaactcctgacctcaggtgatccgcccgcctcggcctccctaagtgccaggattacaggcatgagccaccacgcccggccaataaatcatttttttaaaggaaaggaacatgcattccaccgcccttccatctaaacagcttgccttgcagctgagccaggaatgctgagttacagagacgaattaagctgtagcctggctttccggagtcagcacgccctgccgctaggacctctggcagccccgtgcaaaatgttctgcccggaatggaatatttcccagggtagccaaggagccagtgctcctgggtcaaactcgggcagcacgggctgcggcttcaagaagtgatctggggccgggtgcggtggctcatgctgtaattccagcatttctgtctcaaaaagaaagaaaaagttgcaaagttagtacagataattcctgtagactgggaacctagtttctcccataattaacatcttatattagctgtgtatattttatatttgtcacaattgatgaatcaatattgatactattggttattgataatcaacattgatcaataacaatattgatcaatattggttattagttaccaaagtccatgcttttttagattttcaaagtttttcctaatgtcctctttttttttcttttctctctttttttttttaagagacagggtctcactctgtcatccaggctggggtgcagtggtgccatcatacctcactgcagcctccgcctcccaggctcaagcagtcctcccacctcagcctccagagtagctgggactacaggcaccaccacgtccagctaatctttgtaatttttgtagagacagagttacgccatgttgcccaggctggcctaatgtccttttccttctgccccacaaccccatccaggatcccagatgacatttagttatcacatctcctgacactcctctggactgtggcagtctccctgtctttcttgttttgatgcccttgatagttttgtttgtttgtttgttttgagatggagtctcactctgtcacccaggctggagagcagtggcacgatctcggctcactgcaacctccgcctcccgggttcaagcgattctcctgcctcagcctcctgatagctgggattacaggtgtcctccaccatgcctgcctaatttttgtatttttagtagagatggcgtttcaccatgttgtccaggctggtctcgaattcctgagctcaagtgatcctcctgcctcagcctcccaaagtgctgggattacaggcgtgagctgctgcgcctggcccatcctgtattttttggaatgacatcactatacacagcctacacagagttatccttcatcttttttttttttttttttttttttgagacagagtcttgctctgtggcccaggctggagtgcagtggcacgatctcggctcactgcaagctccgcctcctgggttcatgccattctcctgcctcagcctcctgagtagctgggactacaggcacctgccaccacgccccgctattttttttgtacttttagtagagacggggtttcaccatgttagccaggatggtctcgatctcctgacctcgtgatccgcacgcctcggcctcccaaagtgctgggattacaggcgtgagccaccgcacccggcctatccttcatcttcttgagggcagaactgtacataaactatttccaattcttctgcacaagaaatgtgtctcttctctcctgtttatttgttcagtgacttatttatatccgtatggactcatagacatttattttacatcttgggttataattcaatatttcattatttatttggttgcacaaactgttccagcattgacatagagatctcttctggttgactcaggtttttgtgggggttttatctatttatttatttttaatactttttgctgcatttgagagtcaacaactcatcagagaccaaatcccacagggtcgccctagagagaattcaacttactaacttatttcaaagtttttgaagtcatgtgatgctggggaaaaaccttcattctcctcaagccgtgcaaaaatctccaaaaggcttaatataaatttgattatctaaaagaagcccttcagccctgatgcgttataattttcttcctctgctaaagaaaaaacatgctgggcgggcgcggtggctcatgcctgtaatcccagcactttgagaggccgaggtgggcagatcacaaggtcaggagttccagaccagcctggccaatatggtgaaaccccgtctctactaaaaatacaaaaattagccgggcatggtagcgggcacctgtagtcccagtttacttaggaggctgaggcagaagaatggcctgaacccgggaggcggaggttgccgtgagccgagatcatgccactctactccatccagcctgggcgacagagcgagactctgtctcaaaagaaaaaaataaaagaaaaagaaaaaacatgcgcttgtggtggctcacgcccgtaatcccaacactttgggaggctgaggtgggaagatggcttgagcccaggagttcaagagcaacctgggcaacatagtgagaccccatctctacaaaaaaccaaaaaactacaaaaattagccagccgtggtggtgtgcacctgtagtcccagctactcaggaggctgaggcaggaggatctcttgagcccaggaggttgaggctgcagtgagccatgatcacgctactgcactccagcctgggcgatacagtgaggctctgtctccaaaaaaatgtatatatttaggtccagtgattctccagaactaaatgtgttttgcttttgttcttgtctgactcgcctggctggacctgtctgggccactccactgtcctctgcctgaatctctggtgcccggcgactgatgcctgttcctggatgggtccgcaggccactcccagaagagacgggggtggaactgcttggcagcccggtggaagacacatcctgtaagtttccacgtccacagaagggcggaaacaggctcagtgtttccgggtttcagccctgcctggggctgtaactgtagaaatgtcagaggccacacaccgtgggtagaatgttctgtcctggggtctatggtggaagtggccgtggtgggtgagagacacaatggatgatggcgctctcatgaagccagcacgctgtgttgctgtgtgtccctgtgctagtcactcagcctctctgtgccccaatgcctcatctactaaatgtaggtagcgagcttctcgcagagggggcatgtaaggattaaatgaggtgatgccaaatgccctggaggcacaaagtcagcacagccaagggtgcactgggaggctctgctatctggagctctaaacatatacattttaatgtgtaataccttatattagacccaaatatatacattttttgggagaccgggtcacactctgtcatccaggctggagtgcagtggcgtgatcatggctcactgcagcctcaacctccagggctcaagagatcctcctgcctcagccttctgagtagctgggactacaggtgcacaccaccatggctggctaattttggtagtttttgtagaaatgggatctagctatgttgcccaggctgctcttgaactcctgggctcaagccatcttcttgcctcagcctcccaaagtgctgggattacgggcgtgagccaccacgcctggcatgttttttcttcagcagaggaaaaaaatcataatgtatcaggctctgaagccccagatcccggggatgggagtcctgggcggccagaggagagttttagccgtaacctggcgattgcaacgtgcctccggaggcagggaaagggcccaggttggcaccgtggggagaggtggggtctggggaggacctggcagccagccccacttaacgacattcagttaagcagaatatggaaaataaacctgtgagggccaaacaaaatttttttggagacagagcctcactgtatcgcccaggctggagtgcagtagcgtgatcatggctcactgcagcctcaacctcctgggctcaagagatcctcctgcctcagcctcctgagtagctgggactacaggtacacaccaccatggctggttaatttttgtagttttttgtagagatggggtctcactatgttgcccaggctgctcttgaactcctgggctcaagccatcttcccaccttggcctcccaaagtgttgggattacgggcgtgagccactgcacccggccgcctgtctctatttaaaaagaaaaaaaaaaaaggcaggtcaccgtggctcacgcctgtaatcccagcactttgggaggccgaggcgggcagatcacgaggtcaggagtttgagaccaacctggccaacatggtgaagccccgtctctactaaagatacaaaaaaaaaaaaaaaaaaaaattagccgggcattgtggcacttgcctgtaatcccagtcactcaggaggctgaggcatgaggatcgcttgaacccaggagacggaggttgcagcaagctgagattgtgccattgcactccagcctgggtgacaaggcgagactctgtctaaacaaaacaaaacaaaaaaagattagtcgggcttggtggcgcatgcctgtaatcccagctacttgggaggctgaggtgggagaatcacttgaacctgggaggcggaggttgcagtgagctgagatcctaccattgtactccagcctgggtaacggagtgagactccatctcaaaaaaataaatacataaataaaacaaaataaattagcagactttggattaaagcaggcagccatctgtgatgtgggtgggcctcatctaatcagttgaaggttttaagagaaacagactgaggttcccccaggcagagacaattctgcctgcggacggttttgcaacatcaactcttccctaggcgtcccgcctgctggcctgccctgccgattgaggacttgtcagtctctgtgatcacacgagctaattccttaaaataaatttctccctctctctttttttccatacatataggaaaaaaatatgtatacacacacacacacacacacacacgtcctattggatttgtttccctggagcactctgattaaaataggagactatcctggatcctgtattatccaggtggcctgacatcgttacaggatcctcatgagtggagacaggagggtgagagtcagagaaagcctagaagaagatgggctgctttcacaatttgtctgcacaagagatatgtctcttctcctttatttatttatttatttatttttgagatagagtttcactctgtcacccaggctggagtgcaatggtacgatcttggctcactgtaacctccgcctcctgggctcaagtgattctcctgcctcagactcccaagcagctgggattacaggcgccaccactgtgcccggctaatttttatatttttagtagagatggggtttcgccatgttggccaggctggtctcgaactcctgacctcaggtgatctgcccgcctcggcctccaaagtgctgggattacaggcgtgagccaccgcacccggcccaaagtcaggctttgaactcatgtctgcccaatgtccaagcatccatccccttaatctctgaggcttgcccacaggacagaggttataacattcacccctgtcaggatgatgtcggtttaattctgcccacccccgccaatggcatggatacagaagggagcccaccctctcttcccattcctgcatgatgaaacagcttccaccaggtaggaaaatggggggaaggtaaaagagagaaagcaaagatgttttccatttttctcatttccctgcagctcctcccaacacgctaaatttcaacggagcgcatcgtaagaggaagacgctggtggccccagagatcaacatttctctggatcagagtgaggggtccctgctgtccgatgacttcttggatacccctgatgacctggatattaacgtggatgacatcgagacccccgatgagaccgactcgctggagttcctggggaatggcaacgaactggagtgggaaggtaaagttcagggtctctctggggcctgctggagcccaccccccccaccccacctttccgtctctggattcccataggctcagagagtcacaagtggggcaggggctctaagcagtctagccttaaacccaggagatcaagactgcagtgagacgtgatcatgccactgcactccagcctggacaacagagtgagaccctgtctcaaaaataaaatttttaaaaaagagagaggtggctgggcgcagtggctcatgcctgtaatcctagcactttgggaggccgaggcgggcagatcacgaggtcaggagatcgagaccatcctggctgacacagtgaaaccccgtctctactaaaatacaaaaaattagccaggcatggtggcgggcacctgaagtcccagctactcaggaggctgaggcaggagaacggtgtgaacccaggaggccgagcttgcggtgagccaagattgtgccactgcactccagcctgggcgacagagcgagactccgtctcaaaaaaaaaaaaaaagagagagagaggttggtgaatgggtaccaacatacagttagacagaaggaataagttctattgttcgatagcagaataggaggggtgccaggaggagggtccatccgctcctgcgactgttttttttttttttttgagacagagtctcactctgttgcccaggctggagtgcagtggtgtgatctcagctcactgcatcctccacctcccgggttcaagcgattcttttgcctcagcctcccgagtagctgggattacaggcatgcactaccacttccggctgatgtttatatttttagtagagatggggttttcccatgttgcccaggctggtctcaaactcctgacttcaagtgatacacccacctcggcctcccaaagtgctgggatcacaggtgtgagccacggcgcccagcctgcccctgcaatttgatgcatatttttcttgtgggcttgtgaatttttctgcagaacgtggctttcatcagaatctcaaaggcgaccaagatcccaacaaactgccctcgatgtatgcaacaaatactttttgaccatttactccagggcaagtcctgattcaggcgtggggtatatggcagggctatgataagaagagatggtcctggtccctacctgcacacacagatcatcagaaagacagaccacgaaaggccaggcgcagtgactcacgcctgtaatcccagcactttgggaggctgaggtgggcagatcacctgaggtcaggagtttgagaccagcctggccaacatggtgaagctccatctctactaaaaatacagaaattagccgggcatggtggcgtgcgtagtcccagctactcgggaggctgaggcaggagaatcgcttgaactctggaggcagaggctgcagtgagcagagatcgcaccactccactccagcctgggcgatggaacaagactctctcaaaaaaaaaaaagaaagaaaaaaaaaaattaaggacaatgtagtggctcattcctgtaatcccagagcttcgggaggccagggtaggaggatcgcttaaggccaggagtttgagaccagcctgggcaacatattgaaaccccatctctacaaaaatataaaaattagctgggtgtggtggtgcacaactgtagtcccaggtatctgggaggctgaggcaggaggactgctctctgtgtgccaggctcctgggagagtaaaaaccaagcatgcatgccccgagtatcctcgtggtttgatgaagcagatgcattcaccagctctgagaagctccaggacacaggtccttaaccaacagagtgccctgggaggccagcaaagggaatgtccagaaaggcttcctggaggaggcggcatttgagccaggccttgaaaggggagtaggagaggaaaatgggtcagcagggcagccaggtggggagaagcgaaggacttgtgggtcccggcagcgagggaggtgggagaggggaaggaaggctgagcaggagggcaggagatatccggactctggcgtccatgcgactctccgccacctgcttctagacgacacccccgtggccaccgccaagaacatgcccggggacagcgcggatctatttggggacggcacgacggaggacggcagcgccgccaacgggcgcctgtggcggacagtgatcatcggggagcaagagcaccgtatagacctgcacatgatccggccttacatgaaagtggtcacccacggaggtgagacccgccccccggtgcccccttggggctccagcccggcccactgggcaacagggggttcgtcagtgcccctctctgatgcacggggatgttaagccgtcaactcgcttcgggtggacggactgtgggcaaggcgtgcatggtcagggaggcgcactgggggcccctgatggtcgctgtcactcctcagcgaaggcagagactggctaaggggtcgccggctgctgtggctcggagccatgccctcccgagcgtgtgggcaccgggacgtggtgggtggtgcgcgggaggcagctcagggctgggagaggactctgacgttgccgatcggctgcctctcctcagggtactacggcgaaggcctcaacgccatcatcgtcttcgcagcctgcttccttccagacagcagcctccccgactaccactacatcatggagaacctcttcctgtgagtccccgcccgcggcgagcagcctcgggccagctctgatgcctccctggccacaggggcaccaggctgcaaggattgcattgtggccctaggaagcctgcctggcaccagggaagggcgtggtggccacagaccttgatctgagtccctgctggccctgaggctcacagtggccttccctctgggccaccctgttctcctccccgtcctcctcctcctcctcttcctcctccttcccctcctcctcactgtcctcctcctcctccccttcttcctcccccttcccctttcttctcctccttctcctccccttcttcctcccccctcctcctcccttttctcctcctcctccccttccctctcctcctccccctcttccccttccctctcctcctcccccctcttccttctcctcctcttcctcccctttctccacctcatcctctttctcttcctcccctttctccccccttcctcctccttctcctccttccctcatcttcctctccttccctctcctccccctccccatcctcctcctccccatcctcttccccttcctcctcctcttcccgctctgagatggcaccactgcactccagcctgggtgacagagtgagaacctgtctcaaaaaaaaaaaaaaaaaaaaaaagcaaggcctagagaccagcctggccaacatagtgaaatcctgcctctactaaaactacaatttagctgggctcggtggcaggcgcctgtaatcccagctactagggaggctgtggcaggagaatggcgtgaacctgggaggcggagcttgcagtgagccgagatcgcaccactgcactctagcctgggcaacagagcgagattccgtctcaaaaaaaaaaaacgactcaataaaagagtaactgccctatgaggatgcccgctgacactcatgtggagtgtgctgggatcatccacgtcctctcccaccctgcagtccgccaggacagcagacaacacctggaccagtggggctgacccagccagcggcaggagtggaggcaggcagggtcggcaccgcaggtgtcctgaccctggacccctccatgttgggtccctgccttctgtgccccgtgagcaggtacgtcatcagcagcttagagctcctggtggctgaggactacatgatcgtgtacctgaacggtgccacgccccggcggaggatgcctggaatcggctggctgaagaagtgctaccagatgatcgaccggaggtgaggtggggatgcctcaggaagcacagtgggggcatgaaaatcacacagggggctggacatggtggctcacacctggaatcccagcacttcgggaggctgaggtgggaaggtcccttgagcccaggagtttgagaccagcctgggcaacgcagcaagacgctgtctctacagaaaaacttttaggccgggcaagggggctcacacctctaatcccagcactttgggaggccaaggtgggtggatcacctgaggtcaggagttcaagaccagcccggccaacatatagtgaaaccccatctctactaaaaaaattcaaaaattagctgggcgtggtggcgcatgcctgtagtcccagctacttgggaagctgaggcaggagaatcacttgaacccaggaggtggaggttgcagtgagccgagatcatgccactgcacttcagcctgggcaacagagcgagactctgtccccatgaaacactcactccctattccttctccccaggctccggcaccccccatcctactttctgtctctgtaaatctgatgactctagggacctcctaggactggaatcacacaggatttgtccttttgtgtctggctttcctcactgagtgtgatgtcctcagggtgcatccacattgtagcctgtgtcagagcctccttccttttcatggctgcataatattccactgtatggacataccacatttggtttgtccattccattcatctcttgatggacatgggttgcttccacccctgagttattgtaaatagcctcagagtgacattaaaattgagccagccaatccatccttgcacccaggttagtggagggaggctccaaggacaggctggtccctcctagggcattaggtggtgaaaatacaatcttggctgctcaaataactaccaacctggttcacctgctctgcaccatggggtctctacctacctcatccacctgagggtcttagggactcaaagggtgtgtctttatcccaccataggacccccatgtcttggatgggggcagggatttgacaggtacctggagaccacacgtggaatgagcagagtgacgaatgcttgcttgtggctctcccgtcccacccagctcctccctccccagggctcgccccaggagcccatcttgcttcctttgcggccccacacaggttgcggaaaaacctgaagtccttgatcatcgtccacccctcgtggttcattcggactgtgctggccatctctcgccctttcatcaggtgagacggggaggctgcaacccaagtccagtggcctcagtgtgcgtgtgtgcgtgtgtgtatgcatgcatttgtgtgtgcatgtgtgcacgtgtgtgcgtgtgtgcatctgtgtgtgtgtgcatccatgtgtgtgtttgatgtgcatgttccagcttctctatgatgaatacatattattgctttaaacagttttaaattgcacacagccaggcacagtggctgacacctgtaatcccagctactcagaaggctgaggtgggaggatcgtttgaggccagcctgagcaacatagcaaaacccccatctctacaaaaaatacaaaaattagcaggacgtggtggtgcacacctgtagtttcagctacttgggaggctcacgtgggaggatggcttgagcccaggagatcaaggctgcaatgagccgtgatcgagccactgtactccagcctggatgacagagtgagaccctgtctcaaaagaaaatcagtcatgcatggcatcacatgcctgtagtcccagctactcaggaggctgaggcaggaggatcacttgagcccaggaggtagaggctgcagtgagctatgatcactccactgcactccagcctgggagacagagcaaaacaaccctgtctctaaaaataaaatatatatatatgtatgtataaataaataaataatatgactaataaatttaaaatttaaaactacatatattctataatgtatatcatatatagttactatattaaacatatagtaaaacagatcaagtgaaataaaattaggcatgttaaatgccctattcaatccaataaaatgtcatgcaaatttaatttaatctaatgcaaaacattgaattgaataaagattcctaatgttcacgttcccagttacaaatctgggatgagcgaaagagacgagggcttcactttcccttgaacaacaggacacattcacagcaggcccgattttcaaggaagactctttaaacatgctgttttcaaggactgctaagtaccctgaaggggcttatttgcatattagcgaaatgagatgaggaatacactaattatggatcattttagctaataatgaatcaacaggcaaaacggtaaacacgcatttcagtctaagataattgcatttgctcctctatattccagaattcagtaacatagactacctttgcctttaatgtagatattaggatggtgcaaaaataattgaggttcttgccatattttcattacaaaaactgcaatcactcttgcacgaacccaataattctgtcactcttcaccggtcgccatggctcacacctgtaatcccaacactttggaaggtcgagatgagaggatcgcttgagcccgggagttcgagaccagcctgggtgacatagcgagaccctgtctctacaaaaaaaaatttttttttttttcagacggagtctcactctgtcgcccaggctggagtgcagtggcgcgatctcagctcactgcaagctccgcctcccgggttcacgctattctgcctcagcctcccgagcagctgggactacaggcgcccgccaccaggcccagctaactttttgtatttttagtagagatggggtttcatcgtgttagccaggatggtctcgatctcctgacttcgtgatccgcctgccttggcctcccaaagtgaaaaaaatttttttttaaatacggccaggtgtggtgacccaggcttgtaatcccagcactttgggagaccgaggcaggaggatcgcttgaggccaggagttgaagaccagtctgggcaacatagcaagacctccatctctacaaaaaaaaattttttttaattagccaggcctggtggcgcgcacctgtgatcccagctactcagaggctgagggaggaggatcacttgagcccaggaggtcgaggctgtagtgagccatgattacaccactgcactccagcctgggtgacagagtgagactctgtctcttaaaaaaaaaataccatgaagtgctggtgatgaaacaccacatggtatcagatggccagaattcaggattggaagggaaagaagggaaagaaccattcatccctgaaaaacagagaattgggccaggcagggtagctcatgactgtaatcccagcactttgggagttagaggcaggcagatcacatgaggtcaggagttggagactagcctggccaacatgatgaaaccccatctccattaaaaatacaaaattagccgagagtggtggtgcatgcctgtagtcccagctactcgggaggctgaggcagggaaaatcgcttgaaccggggaggcggaggtggcagtgagccgagatcacaccactgcactccagcctgggtgaagagcaagactctgtgtcaaaaaataacaataacagagaatcaatgggcagccccgtgtgcccccttcttgtgcccagctgagtgttggctgtgccgtcctgtgcggtgacatggagagaaagcatccctgggaaaaattaacacagaggagcaacttttagagatgatgggaaaacagcctgtagagtctaagacaatctccccacctcctgacttccttccaacaagatcctcattgcagggacccatgtcaggtgcatggccctgcttgcaagggcctcggcgcagacccggggtctccactccatgcatggggtgcaagataattaaggctgtcatcgggcgggagggaggtgtcgtcgtctgcactggggcatcctggagtggggtcctgtggggatccctgtcgccatggctctgtctggacctaggtaacccccaccccatgggttgcatttcagacctctccctccttctccccccgccagcgtcaagttcatcaacaagatccagtacgtgcacagcttggaagacctggagcaactcatccctatggaacacgtccagatcccagactgcgtcctgcagtgagtggccccacagtccaccccgccgtattagtctgttttcgtgctgctgataaagacacacctgagacagggcaatttacaaaagaggtttaaggggccgggcgcggtggctcctgcctgtaatcccagcactttgggaggctgaggcgggcggatcacgaggtcaggggatcgagaccatcctggctaacatggtgaaaccccgtctctactaaaaatacaaaaaattagccgggcgtggtggcgggcgcctgtagtcccagctactcaggaggctgaggcaggagaatggcgtgaaccccggaggcggaggttgcagtaagctgagatcgcgccactgcactccagcctgggccacagagcgagactccatcgcaaaaaaaaaaaaaaagggctaacggactcacaattccatgtggctggcaacgcctcccaatcacggtggaaggcaaaaggcacgtctcccatggcggcagagaagagaaggaaatttgtacaggcaaattcccctttataaaaccatcagatctcatgagacttactcactgtcgcgagaatagcacaggaaagacctgcccccatgattcagtgacctcccaccaggtcactcccacaacaggagggaattatgggagctacaattcaagatgagatttgggtgaagagaccaggcaaggtggctcacacctataatcccagcactgtaatcccagcattttgagaggctgagacaggcagatcacttgaggtcaggagttcgagactagcctggccaagatggtgaaaccctgtctctcctaaaaatacaaaaattagccaggtgtggtggtgcatgcctgtaatcccagatactgaggaggctgaggcaggagaatcgcttgaacctgggaggcagaggttgtggtgagccgagatcgcaccactgcactccagcctgggcaacaagagtgaaactccgtctcaagaaaaaaaaaaaaagatttgggtggagatacagtcaaaccctgtcacccccaacacccccccaccgggtccccctggctaccaggagccagcaatgaggggaaacgcagacttggaagggaggaactagaacccacccattttatttcctggagcccctcagggaccccccggagcttggggaagggatgggcagcttcaagtcctgttgtttttcactgaatgtcatatcatcggcacctcccctaggttcatgctgcaaaaatctccttaaacgtacatttttttattgtggtaaaatacacgtaacatagaacttcccatcttagccattccttttttaattttatttatttatttattttttgagaaggagtttcactcttgttgcccaggctggagtgcaatggcgccatctcggctcaccacaacctccgcctcccgggttcaagcgattctcctgcctcagcctcccaactagctgggattacaggcatgagccgccatgcctggctaatttttttttttttttttgtatttttagtagagacagggtttctccatgttcgtcaagctggtctcaaacccctgacctcagatgatctaccggcctcggcctcccaaagtgctgggattacaggcgtgagccactgcgcccggcctatcttagccatttctaaaagcacattcgcatatttgtgcagccatcaccaccatcctctccagacctttcttttttttttttttgagatggagtcttgctctgttgcccaggctggagtgcagtggcacgatctcgggtcactgcaacctccacctcctgggttcaagtgattctcctgcctcagcctccccagtagctgggattaaggcacccaccaccatgcccagctaattttttttttttttttttttgagatggagtttaactcttgttgcccaggctggtctcgaactcccgacctcaggtgatccgcccacctcagcctcccaaagtgctgggattacaggcgtgagccaccacgcctggccgatttttgtatttttagtagagacggagttttgtcatgttggccaggctggtcttgaactcctgacctcagttgatctgcctggctcggcctcacaaagtgctgggattacaggcatgagccactgcacccggccctctccagaacgttctcatcttcccaaactgaaactctgtctccatgaaacactcactccccattccacatcccaacccctggcagcccccatcctactttctgtctctgggagtctgacgactctagggacctcctaggaatggatccacacaggatttgtccttttgtgtctgacgtctctcactgagcgtgacatcctcaaggtgcatccacattgtagcctgtgtcagaatgtccttccttttcatggctgaataatattccattgcgtgaatggaccacattttgtcaatccatttgtccatcaatggacaattgggttgtttccaccttttggctcttgtgaatagtcatgttatttatatgctactcacctatgaccgtagatgtacaaatatctctgtaagaccctactttcaattctaatgagtatatacccaaaagtggaattgctgataattctgtttttttgaggaaccaccatactgttttgttttgttttgctttgctttgcttttttgagacggagtctcactctgtcacccaggctggagtgcagtggcgctatcttggctcgctgcaacctccacctcccgggttcaagcaactctcctgcctcagcctcccgagtagctgggactacaggcgcccaccaccacacccagataatttttttgtatttttagtagagatggggtttcaccatgttggcctggctggtctcaaactccccacctcagcctcccaaagtgctgggattacaggcgtgagccatcgcacccagcctgttttttgttgttgttgttttgttggggtttttctggtttttttttttagacagagtctcactctgttgcctacgctggaacgcaatggcgcaatctcggctcaccatatcctccagcttctacgttcaagggattctcgtgcctcagcctcccgaatagctgggattacaggcacctgccaccacgcccagctaatttttgtatttttagtagagatagggtttcaccatgttggccaggatggtctcagtctcctgaactcagtgatctgcccgcctcggcctcccaaagttctgggattataggcgtgagccaccgtgctcagccaacacataaacatttataatcaaaaatgcatctatgggccaggtgtggtggctcatgcctgtaatcccagcactttgggaggctgaggccagaggatcgcttgagcccaggagttggaggctacaagtgagttcatgccactgcactccagtctgggctatgacagaatgagaacctgtctaaaaaaaagagaagaggccgggcgcggtggttcgcgcctgtaatcccagcactttgggaggccgaggtgggtggatcatgaggtcaggagtttgagaccagccaggccaacatagggaaaccccgtctgtactaaaaatacaaaaaattagctgggcgtggtagcaggtgcctgtaagtcccagctactccggaggctgaggcagcagaatcactcaaaccggggaggtggaggttgcagtgagccaagatcgcaccactgcactccagcttgggcgacagtgcaagactccatctcaaaaaaaaaaaaaaaaaaaaaaaaaaggaagaagaagaagaagaaaagaaagaaaaaagagagcttgtttctctgcttgaaaaggaaagggatttccccaaaaagtatatctcaggggaaaggaaggttgtgtctgacatctttttctttctttcagatacgaagaggaaagactgaaggccaggagggagaggtgtgtgcagagtggtttctgctggggctgggtcggggcagcggggggctgagctgaactctcagttagggcaacccggtgacttctgggcagcagggaccattgtcctgtgcagggctcaagacgctgcccttctggcaaggactttaaactcagacctgggttcaaatactggctcccgcattgagctgcaaggtaacattaagcaaataaaaagctaacaaccaccttggaggttattgtgcaagatgaggcacccttggcaaaaaaggttgagcacagacttcacgctccataaagcataaaagtcaagacgggcgcggtggctcacccagcactttgagaggctgtaatcccagcactttgggaggctgaggcaggaggattgtgtgaggtcaggagttggagaacaacctggacaacatggcgtaactccgtctctaccaaaaatacaaaaattagccaggcgtggtggtgcgtgcctgtaatcccagctacttgggaggctgagccaggagaatcacttgaacctgggaggcggaggttgcagtgagccgagatcatgccactgcactccagcgtgggtgacagagcaagactctgtctcaaaaaaaaaaaaaaataaattagccaggtgtggtggcatgcgcctgtagttcagctacttgcagggagactgaatcgggacgactgcttgagcccaggaagttgaggctgcagtgagccatgattgtaccattgcactccagcctgggcaacagagcaagatcctgtctcaaaaaaaaaaacaaaaaaaaacagcctttatcatgccaggtccaatgccagctttgagggaaacagaggcaaataagacagagtcttggtcccagaagttttctcaaatagcaaaggcagggaacatctcactggtttggaaaacaggtcccaggggacaggaaaaccagagaggccagtactagctgagagcccaccccttggcctggctgggctagtcacccttgtcacctcgttctctctgtccacagcgcgaggccccagccggagtttgtgctgcccaggtctgaagagaagccagaggtggcaccagtggaaaacaggtaggtgtgcaggggaccatgggcagagagctgacagtcacgggaggctgcctactcccttgggggaggctagagaggaagatgggtccttgttcagggacagaaaatggaactaagtggccggccatggtggctcacgcctgtaatcccagcactttgggaggccgaggtgggcagatcacatgaggtcaggagttcgagaccagcctggccagcatggtgaaacctcatctctactaaaaatacaaaaattagctggacatggtggctcacatctgtaatcccagctacttgggaggccgaggcaggagattcgcttgaacccagggggcagaggttgcagtgagccgagatagtaccactgcactcggcgacaaagtgagactccatctcaaaaaaataaataaacaaataaaataaaaataaaaattatcggccgggtgtggtggctcacgcctgtaatcccagtagtttgggaggctgaggtgggccgatcacaaggccaagagatcgagaccagcctggccaacatggtgaaaccccatctcttctaaaaatacaaaaattagctgggcatggtggctcgtgcctgtagtcccacctacttggaaggctgaggcaggagaatcacttgaacctgggaggcggaggttgcagtgagccgagatcagaccactgcactccagcctggcgacagaatgagattctgtctcaaaaataaataaataaataaatatcatccaggtgtggtgatgtacacctctagtccagctactcagaagggtgaggcaggcagatggctggagcccaggaggtcaaggctacagcaagctatgactgcactccagcctgggcaacagagcaagaccctgtctcaaaaaaaaaaaaaaagttatcatgatgttctcatattatcgcaatctcaatgttatcataatgatgaaaggtgacctttgtccaggtcccagcaggtagattcagactcccccaatccagtagaccctgagcaacattattggcttcattttatgttagtgaagggccttggccaatttcctcaaaactgtctgtttgggctcatttgttacgcagcagatgcacgctgacatctgttttgtaccagatacagcagtgtcggtcctcatagggcttacagcctccacgaacaggtagaaaatgcccaagaatgggcactgtggctcacgcctgtaatcccagcactttcggaggccaaagcaggaggaccatttgaggtcaggagttcgagaccaacttgggcaacatattgagactccatctctacaaaaagtttaaaagttagccaggcatgatggtgtataccttgtagtcccagctacttgggaggctgaggtgggaggatcacttgagcccggagctggaagctgcagtgagccatgattgcaccactgccctccagcctgggcaacataacaagaccctgtatcttttttttttttttaagacagattttcactcttgtcgcccaggggccagagtgcaatggtgcgatcttggctcactgcaacctccacctcccgggttcaagcgattctcctgcctcagcctcccgagtagctgggattacaggcacccaccaccacacccggctaatttttgtatttttagtagagacagggttttaccatgttggccaggctggtctcgaactcctgacctcaagtgatccacccacctcagcctcccaaagtgctgggattataggcatgagccactgcacccagccaagaccctgtatcttaataataataaataaataaaaataaaataagttaaagaaaaaaaagggaaaatgcccaggctcccaaaaataagcaaataacgcccagtctccgtctctcctccacaggtctgctctggtctcagaagatcaggaaacaaggtgggtgtgatgcagagtggtcttcgtgctgttttcaaaatgtccttcatggacctgtattagtcagggttctctagaaggacagaaaatcaaaccagctgccagcaaatataaagcaggcagggatcctaatcccaggaaaactgccccatgacttatcgggagtgggggatacggcaccgggaaggcagggaggtagtggttcccttaaccagtcaggccgtccttgcacaactccaggggggcaccattacctagaccaggatgcaaatgaggccccagagttatgcagtggagcggccctcagggaaaaacccacacagagccaagctccctgaagcccaggatatgataccacaaaagggtagactgtccacgctctgcctccgattctccacctggttctggatgccaagaaaagcctccctgtggccgggcgcagcgtctcacgcctgtaatcccagcactttgggaggccgaggcaggcggatcatttgaggtcaggagttcaagaccagcctgggcaacatggcaagaccccgtccctaaaaaaaatacaaaaattagccaggtgagccaagatcgtaccactgcactccacagcctgggcaatagggctagactttgtctcaaaaaaagaaaaaaaaaaggaaagaaaagaaaagcctccctgtgtgttgatgtccaagggtatcctcaggcacaatggtttgccagaaggactcacagagctcagcaaagctgtcatactcacagttatggtttatcacagtggcatggtttattacagtagaagggtacagttaaaaatcagcagagttgggtgtggtggctcatgcctgtaatcccagcactttgggaggccgaggcaggtggatcacttgaaatcaggaattcaagaccagcctggccaatatggtgaaaccccatctctactaaaaatataaaattagctgggtgtggtggcacacacctgtagtcccagctactcaggaggctgaggcaagagaattgcttgaacctgggaggcggaggttgcagtgagctgagattgcaccattgcattccagcctgggcaacagagcaagactctgtttaaaaaaaaaaaaacaaaaaaacaaaaaacttaacaaaaggaagaggtgcatagggctggatccaggagagatcgggtggaagcctgcaagtgtcctctcccagtggggttgtgtggacagcctttatttctcccagcagggatgtgtggcaaaacacacaaagtgctgccaactagagaagctgacccaagcctttctagccagggtgtttatagagagtcaactacatacacctggctgactgtctgcatggcttttcttagcctccagcccctgcacagatcaagctgatgccacgtggcccaagttccaaccctaagtcacgttgtgagtgttattagtccattctcatgctgctatgaagaaatacccaagaccgggtaaattataaagaaaagaggtttaattgactcacagttctgcatggctggggaggccccgggaaatttataatcctggcggaagccacctcttcaccaggcagcaggagcgagaagtgctgagcaaaggggggaaagccccttataaaaccatcagatctcgtgagaactcactaccacgagaacagcatggaggtagccgcccccatggttcagttacctcccactgagtaccgcccacgacaagtggggttatgggaactacaattcaagatgagatttgggtggggacacagcccaaccatatcagttagcatagactatctggcatgacccacatagacactccagccaggatgctccaagagtttagaagttaatcccaggagccagggaaggaccaaacttttctttagaatgtgtgggatttatccttgaccacacagtttttttgttttgttttgtttttgttgttgttgttgtttttgagatggagtctcgctctgtcgcccaggctggagtgcagtggcatgatcttggctcactgcaagctccgcctcccagggtcactccagtctcttgcctcagcctcccaagtagctgggactacaggcgtctgccaccacacccagctaattttttgtattttttagtagagacggggtttcaccatgttagccgggatggtctcgatctcctgacctcgtgatccacccgcttcggcctcccaaagtgctgagattacaggcgtgagccaccatgcccagctgaccacacagttttatacaaatctataagatggcctggccacatgccttactacccatgtgacccaggaagctccaagctaagaaataaacatcaaaaatggccttagaccagtgctgcttaaggggcactgagtaaaagttctcaatgtatttctgaaaagaccacctcaacccaagctctctggagatgagttcacatatacagacagaaaacacaaggaaatcatccaccatgagcaaaagacagcagagacaacaaacagcagaattagatcttgcctggagatccttaggtggataagatataataagcatgttttaacaattaaaaacacaaaagaaggaattgtaagaagcaatagatgaatggatgaatggataggtggataaatggatggatggatggatgagtggatggatggaaggatgtttggatgatgggtggatagatagatgaatgaatgagtggagggatgggaggatagatggatgataggtggatggatggatggataaatggatggatggatggatgggtgaaggttgactgtgtggatggatgagtggatgaatggatgggtggagggatggaaagatggactgatggagagatggatgggtaggcatatggatgggtaaatggtagatgaatggttggttggatgaatggttgggtagatgaatgggtgggtggatggatggatgggtagatggatgggtgagtgggtgggtgggtggatgagtgagtgactggatgggtgggcagatggatgaatggatgggtgggtgggtggatggatggatggatggatggatagataggtggatggatgggtgcatggatgggtggatggctagatgtgtgggtggttgtatggttggttggatgcatggatggatggctagatggatgagtgggtgggtggatggatggatggatggatggatggatggatggacagatggatgagtgggtggatggatgggtgggcagatggatcaatggataggtgggtggatggatggatggatggttgaatagatggatgagtggagggatggatggatgaatggatggatgtgtgggtgggtggatgggtggatggacggatgagtgagtggctggatgggtgggcagagggatgaatggatccctccattgagtgaatggatgggtgagtgagtgtgtggatggatggatggatggatggatggatggatggatgggtggatggatagatgtgtgggtggttgtatggttggttagttggggggtgggttgaagcctccctccaggctgattgaggttgccagtctccagggcctgttctgctgaggcaccaggaaggaggccctcagagccacacttagaaagtgggtggcaggagccgggccctgaagggcatgtgccactcttgctgctgggagttcacccacgctgggtgggatcattgttttggattacatacatgtagaagcgcattttgcacttttaacattaacagcaataacttggcctgtgtctttccctccctagcatgtcctgaggcgacgtgagcataacaaaggacatggaagaagattccagatgccagaaaacctctgtcagacgcccactggccccagatctcatcctgcctcatcctgagtcccaatcttccaagggtgccagcccctccgttcatctctgaaacccagcatccttttcagctgcttgaaaacattgtattttttttttttaacgatgcagtatttgtgcgttccagaaaagggcccagctctgagcccctcacccttccacactcacgaactctcagccgaggaaggcaagaagcgcagggggtggcccgcgtggcgtcggtggcctccgctcctgctcgcagcctctgtggtcagagctggatacaagattcaagacccttctcttgcttgtcacccgctccaggttggagccacagacacccaccgccaccccggctgggtctgcgtcctttcctgtgcctttccctccagaatgcggcctcagacctagaagctcaacccccctatgagggccacgtcctggggtagctcctgacctccgaccttatgtccaaatttcacacccatggtttttcatttgacccgcccccttctcgctcataatgacacccagctcctttgagaggatcagagcccattgcacaagaagagccgctgccaaccatccttgtcctccgattgcaaaatgacaccccagtaatctagaacattctcaagcccctttaactcagatgtcaagccaccgggcaaaccccgtcaatacctcccaccaaggaatgagatatgtggacctcactgctcccccaacccagcgtcaggctgggacacgccaacgctgttccgggttggaacagcagaggctcagaaactggctctgaaataggcagacctagcaagaggaagatacagggtatcgggcgtttgagtgtttcagaagtcattcgggaagataaatccagtgcgctggccgcagccacctgcattcaaagcttggaccagcgggttcttgttcgggaggcaaatttccctaggaaaaagaagacagacttttctaatgtggtccaaatgcggatcactggtcagatggactctagaagcactgagctccctgtctctggaagtatttaagaaaaggctgggccaggcacgatggctcacgcctgtaatcccagactttgggaggccgaggcaggcggatcacctgaggtgaggagtttgagaacagcctggccaacatggtgaaacctcatctctactaaaaatacaaaaattagccaggcgtggtggcaggtgcctgtaatcccagctacttgggaggctgaggcatgagaatcacttaaacctgagaggcagaggttacagtgagccaagatcgtgccactgcattccagcctgggcgacagagcaagactctgtctcaaaaaaaataaaaaataatcagggcacagtggctcatgcctgtaatcccagcactctgggaggctgaggtgggtggatcacctgaggtcaggagttcaagaccagcctggtgaacatggcgaaaccccgtctctaataaaaatacaaaaattagccgggcatggtggtgcatgcctgtaatcccagctactcgggaggctgaggcaggagaactgcttgaacccaggaggcagaggttgcagtgatccaagatcatgccactgcactccagcctgggcaacaagagcaaaactccgtctcaaaataaaaagaaaagaaaagaatggacagtgtttgcagagagttgctcacgagtttccctctaatcctaaatgtcttcatgtctatcagtctgagcagacggtgagtagggcgggcacattctccaggcccttcttcctagctctgtggttgacctctcagcaagtgctatccaggctgggccaaccagacccacaattaactgagcctcagtgaaagcgtccagtgcatcttgacctgagacagcaaggaattgcatttggggttattccaacgatgatggcagggaactggtggtatttagtgctgaggggcagtgatacagaaagatttgccctgtgggacagggtcctgcgcgagtcccatccccaaaagccagcagctcctgccatgaggaagacggggtttctgagcaggcttatgcctgcaggttcctgtggagccaccggctgtgacgggacacctctgggtctcagcattgccctggggaggctgggacatttagggacatggtagggttttaacatttgtttcccaaatgtcaaatcccgggcacaggggcaagaccctgtcccgaattcccaccccagtgaatggtgtcgctgccaaagccaacacaagatgacaaaagtggctgggtacggtggctcacgcctataatcccagcactttgggagaccgagacaggtggatcacctgaggtcaggagttcgagaccaggctggccaacatggtgaaaccccatctctactaaaaatacaaaaattagctgggtgtggtggcgcgcacctgtagtcccagctactcaggaggctgaggtagaagaatagctggaacccaggaggcagagattgcagtcagccgagattgcaccactgcactccagcctgggagacagagcaagactgactcaaaagaaaaaaaatgacagaagcctgattatcagactgcccggaggagacaggctccagcagatagatgccagccaggcccagctgccacgatttgtcccaggtgaccaaaggcacgcagctccagcatgaatcgttctaacccaacagtgacaagaactgctgggccttaaccgtcatggaagactggggccgcttccaagtcacagacaggagacggggacaggaaagaactcattccacccaatcggacacctaataattgagtgtctacagcagcaatcaagtgacaagtgaggccctacctgacccagaaggtgcctgccggctaaacattctgcccccaccagaaactccagggggtccgcccgttatgccgtggcccacccacgcccctttggatcaccagcagtcacagacaacaggcaggcgaaactgaagaccccaactcagccccagcggaccctccagagcaaaagaggcccccggcgaggccacctgtcggcaggcatgccgaggtcaaacagccggggccaccgttcccagctgggccacgacctgcaccgtccacagatgggctttgagatggatttgtatcagggtggggggtgtggtttggccaaaatgcaatggaccccgacccctcctcgtaaaaggatgttgggtttccctctggtgacacatgggatgcgtcataaaccctcccccaaagtcctggtcagcagcccatccttccaacgatgagttttgcggtttttcagaacagaaatgatcactacgattgacgacggtcgtgatgttaagacgtcgtctccatgagctttggggggacttttatgtggaataaagaaactatcactgagaagggaggtttgttccttttgagtactagtaacaggcagggcccagtggctcacccctgccatcccagcactttgggatgcggaggcgggaggatcacctgaggtcaggagttccagaccaacctggccaacatggtgaaaccccgtctctactaaaaatacaaaaattagccgggcgtggtggcacacgcctgtaatcccagctactcaggaggctgaggcaggagaatcacttgaacccgggaggcagaggctgcagtgagccacgatcacgcctgccagttctctccatccacccagtggggacactgtgcggtggccatgtcatacccaccttgatgtctctgtcaccagcaggtcccaaagtcatgctactgtgctccagttgtgtttatgccggcaggtgccctttaggggaaaaggtggggtcttcgtgggtggatggaggggacaaagagggtggagctggtgctgggatcctggggagccgctcccagtttggaggtgacagccccctcctttatcctactgcacggggtctctgattaccctgagaggtttcttgaaaaccccattcacggccaggcacggtggctcacgcctgtaatcccaacactttggaaggccgaggcaggtgaatcacttgaggtcaggagtttgaggccagcctggccaacgtggtgaaaccccgtctctactaaaaatactaaaattagccaggcgtggtggtgcgcgcctgtaatcccagctactcgggaggctgagccaggagaattacttgaacccagggggcgtaggttgcactgagccgagatggcgccacttcactccagcctgggcaaaagagactccgaaccccccaccaaaaaaaaacagaaaagaaggccgggcgcggtggctcacgcctgtaatcccagcactttgggagtccgaggcgggcagatcacgaggtcagaagatcgagaccatcctggttaacacggtgaaaccccgtctctactaaaaatacaaaaattagcccggcgtggtggtgggcacctgtagtcccagctactcaggaggctgaggcaggagaatggcgtgaacccgggaggcggaacttacagtgagccgagatcgtgccactgcactccagcctgggtgacagagcaagactccgtctcaaaaaaaaaaaaaaacaacagtaaagaaaacctcactcgctctttcattcatttcggggcacagggggtccagtccctcacaccactcccagcccaaggggtgggctcaacccagggacctggggccttcctggggaccaggaggaagggacctttctgatcagagaactaatacacaagcagccgtcagccaagccagcaggaggaggggtgtccccggcagagtgacccacggggagcaaggcctggggcagccagagaggggcctgagggccggatcggcgccaccagtgttgcagaaaaacccaggacgaaattaaagtcttcatcatttggtcactttctttttattatcataattacttttttttttttttgagacggagtctcactctgtcacccaggctggagtgcagtggcacaatctcagctcactgcaacctctgcctcccgggttcaagcaattctcctgcttcagcctcccgagtagctgggattacaggcgcgcgctaccacgcccggctaatttttgtattaagtagagatggggtttcgccatgttggccaggctggtctcgaactcctgaccgcaggtggttctcctgctttggcttcccaaagtgctgggagtacaggggtgagccaccgtgcccaggcttttttttttttttttaatcagggttttcctctgttgctcaggctagagtgcagtgatgcaatctcagctcactgcagcctcaacctcctgagctcaagggatccttctgcctcagcctcccaagtagctggtactacagaagcaggccaccacacccagctaattttttttttttttggtagagatggtggggggcaaggaggcgggggtctcacaacgttgcccagactggtcttgaactcctggcctcaagcgatcctcccaccttggcctcctaaaatgctgggattacagtagtgagccactgcaaacatttctttttttgagacggagtctggctctgtcgcccaggctggagtgcagtggcgccatctcggctcactgcaagctccacctcccgggttcatgccattctcctgcctcagcctcctgagtagctgggactacaggcgcctgccatcgtgcccacctaattttttgtatttttagtagagacagggtttcaccgtgttagccaggatggtctcaatctcctgacctcgtgatccgcctgcctcggcctcccaaagtgctggggttacaggcgtgagccaccgcgcccggccaaacagacacttttttaataaatcaagatgagagtcacttaatataaaattaaccatttttttgttttttcattctttttgagatgtagtctcactctgtcgcccaggctggagtgcagtggcgcgatctcagctcactgcaagttccgtctcccgggttcacgccattctcctgcctcagcctcccgagtagctgggactacaggcgcccgccactgcgcccagctaattttttttttgtatttttagtagagacggggtttcaccgtggtctcgatctcctgacatcgtgatccgcccacctcagcctcccaaagtgctgggattacaggcgtgagccaccatagcatacccggcctaaaattaaccatttttaagagtacattcttcacaatgttttgcaaataccacctctattaaattccagaacattccattaccccaaaagtaaatctgtccccagcagccacagtcatccccacccacctcccccagcccctggcacccacgcgtccccttcctgtcctcgtggattgacgtgtcctgggcatttcatgtaaatgggatcactgcaccgtggggcagtgaggtcgctaatcaataccctgggacctgggactgcttggggactggcaggcatttgtagcccctgtggcttctccctctccttcctgccggggtgggctggcacagggaggcctcccagaggtgccctgccagggcctttatctgggcatgtcactgtcacctgaggccctgggccacgtgccccaccaagaggctgccaggaaattcttgccaccgaaactgggccagaggtgaagcccaggagccgggctttcctgggtgcctgcttgagcacctggaggagctctggccacagacatagccaccccgctgcactgccacagatcctgtggctgactgctttttctgagctttcctcatgaataccccaagatttccagtccattttgcaaaagctcttgaagtccagggtcacaattctgttaacaggactcataaagtacatcattggtcgggcgtggtggcttaagcctgtaatcccagtactttgggaggccaaggaggaaggatcacttgaggccaggagttagagacccgcctaggcaatgtaacaagacctcatctcttaaaaattctctctctctttggtgtattgatctcttactgcatacagacatacaaacttggccatcctatcaccccaccttcctagtcacttcccatcctctgatcacccccctgctcctgggctataatttcccacttttccttgtattggtggaaagggagaagattgaattcaatctccctcccatactacaaaaccccatggtagtagtccctcacccgcctcaacaaagtcagccttactgttttaagaagcatcagaaaaattattttctggtggggagaggcgtcacatgcctgtaatcccagcactttgggaggccgagttggaggaatcatcacgtgaggccaggagttcaagaccaacctgggcaacatggcaagaccccatctctacaaaaaattttaaagttaggtgtggtggtgcgaacctgtagtctcagctgctcgggaggctgaagcagaaagatcgccccagtgtgagaagttgaggctgcagtgagctgtgatcacatcaccacactccagcctgggccacagagcgagaccctgtctcaaaaaattcaaaaatgtaggctgggcatggtggctcacacctgtaatcccagcactttgggaggcctgaggcgggcagatcacctgaggtcaggagttcaagaccagcctggccaacatggtgaaaccccgtctctactaaaaatacaaaaattatctgggcgtgttggtgctcgcctgtaatcccagctattggggaggttgacgaaggagaattgcttgaacctggaaggcagaggttacagtaagccaagatggtaccactgcactccagcctgggtgacagagcaaaactctgtttcaaatttatttatttttattttattttattttatttttttgagacggagtctcgctctgtcgcccaggttggagtgcagtggcacaatctcagctcactgcaacctctacctgccaggttcaaacgattctcctgcctcagcctcccaagtagctgggactacaggcgtgtgccaccatgcccagctaattttttttgtatttttagtagagacggggtttcaccatgctggccaggctggtctcgaactcctgacctcgtgatccgcccgcctcggcctcccaaagtgctgggattacaggcgtgagccactgcacccggctccatctgaaattaaaaaaaaaaaattaaaacatttaataagagaatactttttccctttaccagtagaagagagaagcagcagagtgtcattcctccccattaccccctccccgccccgccggcccccagtcaaatgactccacccacaaggcaggcacgggatgaatggtccctggtgtcacgctgagatcctgtggctgggcccccggtcacctgggcaaggctatcttgtgattcactgctaaggatcttaagcccaccttggccctgacctcgttggaaaacgaagctccccgcagggtcccggcctctagggctgctgtgcgggcgggggtgggtgagttcgcttccttgacgccacgagaaccagtcttaatgtcagggtcaggccataggacacagagagcgggatatttttagggagggaaaagtgtggggctgctgatctgagctctctggccaggaggagggaagagggtgggggtggagaggagggaggagggggtaagaaggggaggagaggggaggagggagtggagagagggcagggaggtgggaggagggaagaggcagccccctgcccggccagctcgtgactaatttaggcaaaaggcagcctggagctatttccattcggcggcgggaacaggtgccggcgcctccgccccatccccaggggccgcctcccccggggcggcctccaggctgccgagacctataaaggcgccaggttttctcaatgaagccgggacgcactccggagcgcactgcgtggtcgcaccctacccgggctgccttggaagtcgtccccgccgcccctccgcaccggcatgaagctcatcgtgggcatcggagggtgagcgccgggggacctggtgggcggccctgcggggcaaagccccctgtgcgcgcagagggggaggcccgggaatgaatggagggatgcctggcgcctgaggtcacctacacgccgcccgaggtcagagtgcagggaggattttctgccctgggggtctcggtgtccccagtgggaaggggggctggacactgagcccagtgtttcattttttaaatggaaatgattcccgccaccttccaattatactcagcataaaaaaaaaatagaccagacacggtggctcaggcctggaatcctggcactttgggaggccgaggcgggtggatcacctgaggtcaggaatttgagaccagcctggccaacacggtgaaaccccgtctctactaaaaatacaaaaattagctgggcacggtggtgcatacctgtaatcccagctactggggaggctgaggtgggagaatcgcttgaatccgggagatggaggttgcagtgagtgcgatcatgccacttcactccagcctgggcgacagagtgaggctgtgtctcaaaaaaaaaatcagtagggacagaaaattaactaaagctccagtgaaccctcctcccgcctcgtggctgtcctggctaaatcggggactgacacgtgggcaggtgggatggggtccccaaaatgtcattccacatgactgtgcctttggagcctctctcaggcgacctcaggctagaagagattcaaactctctgtaaccagcacggctggctttgtggggctcacacccccgcctcagaagggacgggagcttggtctaatgctagccggactccctcttgaatttcatattttttgttttttggggtttttttttttggggggggggtgttgttgttgccgtcgtagtttgagacagagtcttgctctgttgccccaggctggagtgcagtggtgtgatctcggctcactgcaagctccgcctcccgggttcaagcaattctcctgcctcagcctcccaagtagctgggattacaggcgtgaaccacatgcctgtctaaactttgtgtttttagtagagatggggggtttcaccatgttggccaggctggtctcgaactcctgacctcaagtgatccaactgtctcagcctcccaaagtgctgggattacaggcgtgagccaccgtgccctgcccctaatatttttcgagtaagaagcctcgaattttcattttgcactcagcgctgcaaatgtcacagcccacccggggcacaaaataacttggattcatgtcaggcactttctttttatttttatttaaaaaattattaatacctgggggcttacattttaaaaattgggttttaaattttataatacagatgggagtctcactatgttgcctaggctggtctgaaactcccaggatcaagtaatcctcctgcctcagcctctccaaatgctgggattacaggtgggagccaccacacctgagcaacattaggcatttttctaacctgcctcttctggatatgatataggtgtcctctttttccgtcagtcttttttttttttttttttttttgagacaaaatctcgttctgtcaccaaggctggagtggagtggcacaatctcagctcactgcaacctctgactcctgagttcaagcgattatcttgcctcagcctccctagtagcttggattataggcacccaccactacgcccagctaatttttgtatttttactagagacagggtttcaccaggttggccagtctgatcgcaaactcctgacctcaggtgatctgcctgcctctgcctcccaaagtgctgagattacaggcatgacccaccacgaccagctaaaattgtttatattatctatttatgtatttatttatttatttaaagacagggtttcactctcacccagactgaactgcagtgaggtgatcacagctcactgcagcctcgaactcccaggctcaggcgatcctcccatctcagcctcccaagtagctaggactacaggcatgcaccaccacacctggctagtttttaattttttgttaagatggggtcttactatgttgcccaggctagtcctgagctcaagcgatccacctgcttcggcctcccaaagtgctgggattacaggcatgagccaccgtgcatggccggtgctgttttatttttttaagccctgctgagactaaatcaatttccttatctgtaaacataggtgggccgggctcacacctgtaatcccagcactttgggaggccaaggcaggcggatcaccagaggttaggagttcgagaccagcctggccgacatggcaaaaccccatcgctattaaaaacacaaaaattagttgggtgtggtggcgcacgcctgtaatcccagctacttgggaggctgaggcaaaagaattgcttgaacctgggaggcagaggttgcagtgagccaagattgcgccattgtactccagcctgggcaacagagtgaaactccgtctcggaaaaaaaaaaaagaaagaaaccctgtctctactaaaaatacaaaaattagccaggcgtggtggcgtgtgcctgtagtcccagctactcaggaggctgaggcaggagaattgcttgaacccgggaggtagagcttgcagtgagctgagatcgcgccactgcactccagcctgggtggcagagcaagacttggtctcaaaaaaaaagaaaaagaatcagaaaaatcctgggagctgatttgcaggaagaccctgagacatggacaggccccggggagcccaggctgcacctcaggcccccttctgagcaccctgaccttcttggggggagcccaggcagtctcatgcacacgctgtctccccagcatgaccaacggcggcaagaccacgctgaccaacagcctgctcagagccctgcccaactgctgcgtgatccatcaggatgacttcttcaaggtgcccgcccttgcccggggaggtggagctgagaggggatgcagggtgggcagccaggcccggccagccccgccctccactgcccagtgcccgtgtgggctgggcactggctccactccctgcctgacccctcctggggtctctgggataaactgggccaggaaagtgagggacgggtgtcgtgttcccatttcctaagcacctatttcatacgcagcccattctcactggacatccctacagtggggaccccagttagatggatgggaaagccaccattcctccacagggccagccggctgtggctttctgggtgaataccctttattcctctccacctcccctttcccatctgcaaaatagactctgagcccagctcgctgtgtgggtgtgggtgggggtgagggctaatgagatgattgatggtctggggaaaatctgagggtcaggcagagcccccacgcctcagggacctcagcagctccagcaagggaccccctaagactccatcacccaggccgggggtgaggcaggaccgggcactgagcccgaggttcaggctcctctgtttcagccccaagaccaaatagcagttggggaagacggcttcaaacagtgggacggtaaggacaagcatcacctccaagccccactatcccccggggtccgccctcctgcaatgcccgctccccctccactattcccccggggtccgccctcctgcaatgcccgctccccctccactattcccccggggtccgccctcctgcaatgcccgctccccctccactattcccccggggtccgccctcctgcaatgcccgctccccctccactattcccccagggtccgccctcctgcaatgcccgctccccctccactattcccccggggtccgccctcctgcaatgcccgctccccctccactattcccccggggtccgccctcctgcaatgcccgctccccctccactatcccccggggtccgccctcctgcaatgcccactccccctccactattcccccggggtccgccctcctgcaatgcccgctccccctccactatcccccggggtccgccctcctgcaatacccgctccccgtccactgtccccccggggtccgccctcctgcaatacccgctccccgtccactgtccccccggggtccgccctcctgcaatgcccgctccccgtccactgttcccccggggtccaccctcctgcaatgcccgctccccgtccactgttcccccggggtccaccctcctgcaatacccgctccccgtccactgtccccccggggtccaccctcctgcaatgcccgctccccctccactgtccccccggggtctgccctcctgcaatacctgctccccgtccactgtccccccggggtccaccctcctgcaatacctgctccccgtccactgttcccctggggtccgccctcctgcaatacctgctccccgtccactgtccccccggggtccaccctcctgcaatgcccgctacccgtccactgttcccccagggtccgccctcctgcaatacctgctccccgtccactgtccccccggggtccaccctcctgcaatacccgctccccctccactataccccggggtccgccctcctgcaatgcccgctccccgtccactgttcccccggggtccaccctcctgcaatacctgctccccgtccactatcccccagggtccgccctcctgcaatgcccgctccccgtccactgttcccccggggtccaccctcctgcaatacctgctccccgtccactgtccccccggggtccaccctcctgcaatgcccgctccccatccaccgtcccctggggtccgccctcctgcaatgcccgctccccgtccactatcccccagggtctgccctcctgcaatgcctgctcccctttccccagtgctggagtctctggacatggaggccatgctggacaccgtgcaggcctggctgagcagcccgcagaagtttgcccgtgcccacggggtcagcgtccagccagaggcctcggacacccacatcctcctcctggaaggcttcctgctctacagctacaagtaaacatctgcaggctctggccccaggcatggccctctctgggcgggtatagccatctcttgtttttttttttttttttttttgttttgtttttttttttttttgagacaagagttttgctcttgttgcccaggctggagtgcagtggtgagatcctgactcactgcaacctctgcctcccagtccaagcaattttcctgcctcagcctcccaagtagctgggattacaggcctgcgccatcacacccggctaatttttgtatttttagtagagactgggtttcaccctattggaccaggatgttctcaaactcctgacctcaagccatccgcccgcctcggactcccaaagtgctgggattacaggcgtgagccaccacgcctggctcacatctccattttaatagtcaggagacccaggagcagagccaccacgggaagtcaggagttgggggcagagctgggatcaacccaagtctggagccaggcgtggtggctcaccagcactttgggaggccaagatggatggatcacctgaggtcaggagttcgagaccagcctggccaacatggcgaaaccctgtctctactaaaaatacaaaaaattagccaggtgtggtggcgtgtgcctgtaatcccagctactcaggaggctgaggcaagagaatcgcttgaacccgggaagtggaggttgcagtaagccgagatcgcaccactgcactccagcctgggcgacagagagagactccatctcaaaaaaaaaattaaaactaaaaactcaagtctgggacaaacagccacccttcttggggagactgagtctttcttctggaacctcagacttctcgggcagaccagtaacctaggctgcgccctctggcttcactgtgtggccctgagcaagacattctgtctgtctgtgcccgtccaagttggagaagaagcgtgattcaattttgtggggggctgctgcagggatgttggccaattcagcttccctccctgacccctaaactcactggcccagaccaccccatgtgctcgccaccctctgaaagccaaggctggggggttggatattttgactgcggttgaaggaaagctcacaggtgctgaccgtgtctcccccactccgcccaggcccctggtggacttgtacagccgccggtacttcctgaccgtcccgtatgaagagtgcaagtggaggagaaggtgcacttggtgtctgggggtgcggtgggctcctgagggccctgtcttgaattactgggtggaaccagcggtaacctagaaaatgccactgggggctgggcacagtgtctctgggctgtaatcccagcacttccggaggctgaggcaggtggatcacctgaggtcaggagttcgagaccagcctggccaacatggtgaaaccccgtctctactaaaaatacaaaaattagtcgggcgtagtggcgtgcacctgtaattccagctacttgggaggctgaggcaggagaatcgcttgaacctgggaggcagagctgagactgggacactgcactttagactgggtgacagagggagactctgtctcaaaaaaaaaaaaaaaaaaaaaaaaaggcggccaggcgcggtggctcacgcctgtaatcccagcactttgggaggcttgggcggatcacctgaagtcagttcgagaccagcctggccaacatggtgaagccccatctctaccaaaaaatacaaaaattagggaggccgagatgggcggatcacctgaggtcaggagtttgagaccagcctggccaacatggtgaaacctatctctactaaaaattgaaaaattagccaggcatggtggcgggctcctgtaatcccagctactcaggaggctgaggcaagagaatggcttgaacccgggaggtggaggttgcagtgagccaagatcaggctactgtactccaacctgggcaacagagcgagattccatctcaaaaaaaaaaaaaaaaaaagagaaaacgccactggacacgggccacatcccaacgccacaggcactggccacttagctggctggagctctgtgccaggtgcccagagcctgaggcctggatagcacggcccaccccaaccctgtccagggcatctcccggacccacagggtgaacatgccggaggttggagcctctagcccagggcttctgaccgagggtccccttgctcagaggttctgtccctgactatgacagctttcaggccccccaccgggggtatattcttagcatcacccttctgtgctctaagccatccttgccttctccctctgcagtacccgcaactacacagtccctgatccccccggcctcttcgatggccacgtgtggcccatgtaccagaagtataggcaggagatggaggccaacggtgtggaagtgggtaagcccctgagcatgaccaggccttgccccgggcgggcgggggggaccctgggcccagcccctctccatctttttttttttttttttcaagacagagtctcactctgtcacccaggctggagtacagtggcacgatcttggctcactgcaacctccgcctcccaggttcaagccattctcctgcctcagcctcccaagtagctgggattacaggcgtgagccaccacactcggcccctaatttgtgtattattaatagagacagggtttcaccatgttggccaggctggtctcgaactcctgaccttaggtgatctgccctccttggtctcccaacgtgctgggattacaggcgtgaaccactgcagctggccaccattctaaacgcccttcagtactccccactcaggacctttggaaacctggacattcctccgtgagcctcgcccccagtccctcttgctatttttgttgttgttgtttagacggagtcttgttctgtcgcccaggctggagtgcagtggcgcgatcttggctcacggcaatctccgcctcccgggttcaagcctttcccctgcctcagcctcctgaatagctgggattacaggcgcgcgtcaccacacccatctaatttttgtatttttagtagagatggggtttcaccctgttggccaggctggtttcgaactcctgacctcgtgatccgcctgcctcggcctcccaaagtgctaggattacaggtgtgagccaccgcgcccggccccctcttgctgttggtccaggaaactgactccagcagcccgactctgcagatctccttgctcctgacccagccgtccactcgtccccccgtgctctggcccccttcctcccggcagccctgacgcagcctttctgatttcagtctacctggacggcatgaagtcccgagaggagctcttccgtgaagtcctggaagacattcagaactcgctgctgaaccgctcccaggaatcagccccctccccggctcgcccagccaggacacagggacccggacgcggatgcggccacagaacggccaggcctgcagcgtcccagcaggacagcatgtgagcgtttccctatgggggtgtctgtacgtaggagagtggaggccccactcccagttgggcgtcccggagctcagggactgagccccaagacgcctctgtaacctcgctgcagcttcagtagtaaactgggtcctgtttttttaactgttggtgtctaccgtgttctgtctaagatccgtcaggccaggtgcagtggctcacgcctgtaatcccagcagtttgggaggccgaggagggcggattgcctgaggtcaggagttcaagaccagccaggccaggatggcaaaaccctgtctctactaaaaatacaaaaattagccaggcatggtggtgcatgcctgtaatcccagctacttgggaggccgaggcaggagaatcgcttgaacccgggaggcagaggttgcagggagccgagatcgcactactgcactccagcctgggtgacagagcaagatccgtctcaaaaaaaaaaaaaattaaaaattagctgggcatggtggtatacctgtgtagcctcagctacacaggaggctgagacaggaggattgcttgagcccaagaggttgaggctgcagtgagctatgatcaggccactgcactccagcctgggtgacaatgcgataacctgtctcaaaaaaattttttttctcaatgcctataaataaagttttattggcacccggcccctgccatttgtacgtgtcagccctgtggctgctttagtactacaatagcatgttgagtcaccctgacagagaaggtctgtctgcaaagccaaaaatatttactatttgcccctctgtgcaaaatgtgtgctgaacggtgtggtgtatgccaggtcgagtccagggccacagggagggtctgaggtctccgtgctggaggggaagcaggagtggatatggaatgggaggatgacgtggaagaggtggcttgccaaggcttctccttccccataagcacagagtgtggtaaggatgatctgccggtcactgtgcccaaaatagtccaggacaggacagagacatgagggaggtggttccaggacagcagaagccctgcctggcagcccagataccttgggcattattgttcttttaaaaaaaaaagaaaggttcatgcctgtaatcccagcactttgggaggttgaggggggaggatcacttaagccccggagttccagtccagcctgggcaagatagtgagacccccatctctacaaaaaatgataaaatattagcaaggcgtggtagcccatgcctgtaatcccagcactttgggaggccaaggaggtgaattgcttgagcccaggagtttgaaaccagcctgggcaacagagtgagaccccgtttctgtttttatttttctgtatttatttttacttagttatttatttttgagatggagtctcggtctgtcgcccaggctggagtgcagtggcgtgatctcggctcacggcaatctccacctcccaggttcaagcaattctcctgcctcagcctcccaagtagctgggatcacaggcatgcaccaccacgcccagctaatttttgtatgtttagtaaagacggggtttcgccatgttggccaggctggtctcgaactcctgacttcaggtgatccacccgcctaggccccccaaaatgctgggattacagacgtgaaacaccatgcccggctgtgagaccccgtttctacaaaaaattagccaggcatgatgacacatgtctgtagtctcagctactcgggaggctgaggtgggaggatcccttgagcccagaaagttgaggctgcaatgagttatgattgcatgactacactccaggctgggcgacagagcaagaccctatctcaaaaaaaaaaaaaaaaaaaaacaaaacaagaaggggaacagtagccacagggtaaccaaccaaaaaacggaagatgataagggttggccaggatgtggagagagcaaaacccttatgctctgaggtgggaaatggaacacagtgagcctgacgagaaacagtctggccgtttctcagaattaaacatggaattaccatagggcctagcaatcctgctcctgggcaaggccccaaggaattcacagcagggactcaaagagatccttgcacagccatgttcatgggggcacagcccacaacagccaaaaggtagaggcaacccaagtgtccacagacagatgaatgaatgaacacaatgtactccatccgtacatgaatattactgagccatgaaaaggaagggaatctggacacagggcacaacaggatgatccttgaagatgtcacgctccgtgaaataagccaaggccgggcatggtggctcacccttgtaatcccaacactttgggaagcggagaggggtggatcacctgtggtcaggagttcaagaccagcctggtcaacatggcaaaaccccgtctctactaaaaatacaaaaattagctgggcatggcggtggcgtgcctgtagtcccagctacttgagaggctgaggcaggagaatcacttgaacccaggaagtaaaggttgcagtgagccaagattgcgccattgcactccagcctgggcaacagaacaagactccatctcaaaaaaaaaaaaaaaaaaagggaaggaagggagggagggagggagggaggaagctgggcgtagtcgctcacacctgtgaatcccagcactttgggaggctgagactggaggagccaaggagtttgagatcagcctggacaatatagcaagaccctgtctctacttttaaaaaaaatactggggggctagagcagtggctcacgcctataatcccagcactttgagaagccaaggcaggaggatcgcttgagcccaggagtctgagaccagactaggcaacatagtgagaccctgtttctttttttaatttaaaatgttattcttggccgggcacagtggctcatgcctgtaatctcagcactttgggagaccaaggcacccagatcacttgaggttaggagttcgagaccaacctggccaacatggtgaaaccccgtctctgctaaaaatacaaaaattagctgggtgtggtggtgcacacctgtaatcccagctatttgggaggctgagacaggagaatcacttgaacccaggaggcggagattgcagtgagccaagattgcaccactgctctccagctggggtgacagagggagattccatctcaaaaaaataaatttaaatttaaaaagtaaaataaaatatttttaattaaaacaacttttttggccaggcgcggtggctcactcctgtaatcccaggactttgggtggctgaggcaggcagatcatgaggtcaggagtttgagaccagcctggccaacatggtgaaaccccatctctactaaaaatacaaaaattagccgggcatggtggcacacgcctgtaatcctagctacttcggaggctgaagcaggagactagcttgagccagggaggcagaggttgcagtgagctgagatcacgccactgcactccatcctgggcgacagagcaagactctgtcttggggaaaaaaataataatgattaagatggcaaattttgctttgtgtgttttgctaaaagttaaaaaaataggaacaggagcactagggtagctagctcatcccagttggcccagaacgttcctggtgttaccactcaaagtcctgtgttcccaggagaaacaggaggatgagtcacccttatgggagccaatcagcttgagaagtcagattactccatgacccattcttatagggctcagagagggaaagaaacttgcccaaggtcacccagcagagctgatatttgaactcagctctgttgaatgccaaccccctgaccttctccagccccatgtggccttccatcttcacactcgcctgctgggaagaccccctctcccctcccagagccatctaaggggcccagagaatcccaccccaacattgcccgagtacagctggattctgggtgcagtgatggtgtcggttaacctctgcctgtctcgcggctcctgccctccacaaacagaaccagtgactcattctccccaaatgcaaagcagatgcacctgtaatttgtccccctaggagtacccgtccatcagcgacagggacagggcaccccgagaccaggcagccccgggtgcaggtgggcagctccaggacccagcctgctcggcccaaacccaggcagcctctgccacttcctggcccactgtccccaggcaggtaaaacgccgtctctgtgcctcagttccctccctcgtgtgctcagcgtagcaccaggcgcttggagttatcacagctgctgggttgatggctggtgtcgctatgcaccacagtgacaaaccgaggcaggccccgacccacaggccagcccgatgggcacagtgagcgggatccacctgccaggtgtctagcagggcttggaattctccccagcaccccgagagagatgcgtgcaactgactcctttttgcagatggggaaactgaggctcgggaagtggatttgcttacccaagaccacacatgaaaggtggaatcagggccaggtgaggtggctcacgcctgtaatcccagcactctgtggggccaaggtgggtggatcacctgaggccaggagatcgagaccagcctggccaacatggtgaaaccccgtctctactaaaaacacaaaaattagccaggtatggtggtgcatgcctgtaatcccagctactcgggaggctgaggcaggagaatcgcttgaacctgggaggcggaggttgcagtgagccgagatctctccattgcactccagcctgggcaccatgaccgaaactccatctcaaaaaaaaaaaaaaaaagaagaaaaaggaaaaaagggggaataaggatacgagtccaggtggccgagcctgggaacctgagccaggtccactgtcccatgcctgggcccagtgtcagggtaccatcacctcgggaatcctcgttcccccagaggagacccctcctgctcctgtgtgggacccccctccatcacctccaacttcctggaatcccctcagggtcccgccagtcccccagggctttctggtcccctcagcggaggccctagtccccagcaaccacccccttggctggatgcttctgaagtccctcattctcctcctgcactcacaatgggggccacagacacccccacacacaagcttgtgttctttctctctcttttcttccctccttccttcctctcttttctctctttctctctctctttctctctttctctctttctttctttctttcttgacagagtcttgctctgttgcccaggctggagtacagttgcgcaatcccggctccctgcctgcaaccgccgcctcctgggttcaagtgattctcctgcctcagcctcccgagtagctgggatcacaggcgtgcaccaccacgcccggctaatttttgtattttttagtagagatgggggtttcaccatgttggccaggctggtctcaaacacttgacctcaggtgatcctcccgcctcggcctcccacagtgctgggattacaggcgtgagccactgcgcccggcctgtgtttactttacaagtcccacttattttattgatttttaactaaattcctctgaagaggaacctttctgacacaacatgaggaaacctggattttctgatacatgttaaaccacagagcggctcgggtggctcatgcatggaatcccagcactttgggaggtcgaagccggaggatcacttgagcccagaagttcaagaccagcctgggcaacatagcaagaccctgtctctacaaaaaatattaaaaattagctgggctttggggtgcatgcctatggtcccagctactggggaagctgaggtgtgaggacttttttttttttttttttttttttgagacggagtctcgctctgtcgcccaggctggagtgcagcggcacaatctcgggtcactgcaagctccgcctcccgggttcacgctattctcctgcctcagcctcccgagtagctgggactacaggcggccgccacaacgcccggctaattttttgtatttttagtatagacggggtttcaccctgttagccaggatggtctcgatctcctgacctcgtgatctgcccgccttggcctcccaaagtgctgggattacaggcgtgcaccaccgtgcccagctggtgtgaggatttcttgagcccaggacgtggaagctgcagtgagctatgatcacaccactgcactcccacctggacaacagagcaagaccctgtctcaaaaacaatgcaaaaagccacagaattcatatcatctaaaatcatccttgccttcaccttcctgaaatgctcccggccaagagcaatctcaggccaatagttctcacctgggggtgattctgctcccgccaaccagggaacactggacaatgtctggagacatttgtggtcctgacgccttgggaaggggtgagcggaggccagggatgctgctcgacccctgcagtgcccaggacagccccaccccagagaacagtccaaccccaaatatacacagtgtcccagggaagaaacttcttctaagggcagagaatgggctccaatcctaccctgggctgggcatggtggctcacacctgtcatcccagcactttgggaggctgaggcgggcagatcacttgcggtcaggagttcgagaccagtctggccaacatggtgaaaccccatctctactaaaaatacaaaaattagccgggcatgatggtgcacacctgtaatcccagccactcaggaggctgaggcaggagaattgcttgaacctgggaggcagaggttgcggtgagccgagatcacaccactgcactccagcctgggcgacagagccagaccctgtctcaaaaacaaacaaacaaaaaatcctgccccgctcccttgaggtacctatcgtgggcccaggaagggactgagagtccagggcaggcaccaaccatcacacagaggcccccatgttgtcgcgtggctgacacttctctgggccaagtcattcccggagcttgaggaacttggctgagggtagcctggctctactgaaagtcccctgcctgggggcctccctccttgacccttgcaggaccccaggtgacaggcagcccatggagtctgtggagggcagaggacctcgttggaagctggccttccgagctcccgtgcgagggcgggattctcgtgcccacagtggggtccttggtttgcagcttctgaagcctttccctgtgaggggttggggaggggtgtctcagggttcccggggcctgggacagacaggcaggaccccgctgtgcccctggctcagtggcttctccagctgggaaggcaatctttggggggtttttttgaggcagggtctcactctgtcacccaggctggagtgcagaggcaccctcatcgctcactgcagcctcaacctcttgagctcaagcaatcctcctgcttcagcctcccaagtagctgggactacagggcgtgccaccgtgcccagctaatttttttattttatgtagagatgggatctgtttcccaggccagtctcgaactcctgggctcaaggaagcctcccaactcagccttccaaagtgctgcgattataggcgtgaaccacctgggtcatcaggaagccagtctgcagccccctccctgcctgggaggcactggagggtgtgtgcgcagacagatggacagtcccttccatggagaacctgaactccctgccctgccctgcccgctcccctgggaccacccagccctgggactctgccctcaggcccttccccagaagtcctgctggccatgggaagagagaggctgagacccacccggatggaagcagagaggccctgggaggtgggggggatgaggttttagtgccggcctccccccaactctatttcaggcacccccaccccacccccaaccatctgccactcacatcaagtagtagtcagccggccccttaatcagcagttactccgctggcgccgccccccgccccccaccccagggccctaccagggccaaagctgtcacctccaaggccaccgagcttgggtgccccagactccctgctgccagggccttaagggggtgtccttggggccagctgtgggcccagctagggcctgggggagaagcaggctgaagaggccagacaggatccaccctgcacattctgggggagctgcgggctcccgagaaatggccttgtctcctctctgcccccgttaagcttctgcagcattcaacgaggtcgagaaaccactgagcttccgggaggacgagggcccagccccctccaaggtaggggagggggtgacaaggtgggggtccagcggctctccaagcagggaacccgtgaggtgcagtcaatccaaacagggctcattgaggacatggcctgtaagttctcccctaaagggaccttcaaactatgaaaccccagagaggggcgggagaccccaggacagccaggggttggggtggggagggggccggagggagggagcccccacctccgtcctcgccattcgcctccccccactgagggagccacagctgtggccacatcatcgcaagacacacatgcattgttggggtcacccggcctgcggcgggatccccggctctgtccccttagataaggagaagcagtgagcaggcccagcccccaaacagctcagccgctgcctcctcctcctcttcctcctcctccccacagccatcttccctgctccttaggcagggctgggcctgggctgtcctggaggccaccgaaccgcctgggacaagtaggtaccaccccggatctgtgcttcggacgtcctttgaggggggatctcatttcaccactgttctgtgtctgacttccggccgccgagcgggggcccgtgttctgcacgaggctgaccagggggacggggggagagatggttttggtacttacttttctttttgtctcacaacaggggggttaaggttctcgggggctgaaggagccgcttggggctggcaggcctggctttatagcggctgtcaccctggacctgggcaaaggcaccgtggttattaatagtgaccgcagtttcatgcccgtgtatggtcaaggccacggcagctgcgggctctgctggactcaggcctcctcccaacacctgctccaggccctgacctggaggcgccaggcagcgctcgccccacccaacgcgacttggcaatgactaagtctgagaccctagaatcaaacaagactcatagttgggggccctccagagggtgccaggccccgctgcagcccttccttccgccctcaccaccatcttgggaggcagatggaatcgctgtcccctggggagggggaaatggcagagaggcagcaccgtttaccaggagcagagccaggatgtgcttcaacccaggacacattttgcagacagtgtgtaactaaatccaagctgcggcgcaaagcctcaaatgcgtgttctgtgtcctgtgctgcctttgctcagcctggggaaaccgggagggccccgatggcctcctctgctcctgcaggtgcgtcccctaggcaaagagccctccatcctcagagggggctgggcagggtcctgcttctccttgagtcacttctgttccctgctagccctggaactcttctgctttcctcttctccccttctcctcttcttttctttttgagagagtctcactctgttgcccaggctggagtgcagcagcacaaccgtggctcactgcaacctccgcctcccgggttcagaatgattctcctacctcagcctcctgagtagctgggacttcaggtgcccaccaccacgcctggctaattttttgtatttttagtagagacgggatttcaccctgttagccaggtcggtctcaatctcctgaccttgtgatccacccgcctcggcctcccaatgttcttggattgcaggcgtgagccaccgcacccggcctctttttttttagacggagtctcgctctgtcgcccaggctagagtgcagtggtgcaacctcggctcactacaacctccgcctcctgggttcaagtgattctcctgcctcagcctctggagtagctgggattataggcgcccgccaccacacctggctaattttttgtatttttattagagacaagaatttcaccatgtggttcaggctggtctcgaacttctgacctcaggtgatccacccgcctcggcctcccaaagtgccggttctgttcttttttttttttttttttttgagacagagttttgctcttgttgcccaggctatagcgcagtggtgcgatcgcagcttaccacaacctccacttcccgggttcaagcaattctcctgcctcagcctcccgaatagctggggttacaggcatgcaccaccacgcccagctaaattttttatttttactagagacaaggtttctccatgttggtcaggctggtctcaaactcccgacctcaggtgatctgcccacctcggcctcccaaagtgttgggattataggcgtgaggcactgtggccggcctgcttttttcttttcttttcttccacccctcccttgccctctcctcccctctcttccccttgccttctctcttctttttctcttctcttctctttttttcttttttcttttcttttcttttctgacagggtctcactctgtcacccaggctgcagtgcagtgatataatcacagctcactgcagccttgaccgcctgggctcaagtgatcctcccgcctcagcttcctgagtagctgggattgcaggcatgagccaccacacccagctaatgttctaattttttgtagacacagggtctccccaggttgcccagtctggcctgcaactctcgggcccaagcaatcctcccgcctcagcctcccacagtgctgagatgacaggcgtgagccaccgcacccggcctgaaattttctcaacaggccgatcatctcttctctggggaagcggaggccccctcaccctctcattactgcaaagcctgcctcccacggtccctggctgtgtgctgtgttcctgagcgcagcccagagttgggggggaccctgcgtggtgtggggtgttccctcccccgcgacgtctatcttatctgtccagcacctgaggtcctgtgttcaaccagccccatgacctttctctgatgccccagggttgagtcacagccaagctatggcctgaacccagcttgccttgtcctggaggtcacgcctggcccagcagctgcaggggggcggggggggggacccgcacgcgacaaccctgcccaagagcagcagcacggacgcccaggacgcaggcagctgcagtcatcgctggatgcacagggatgggcaccaggcaagaaacacaccaagccctcactggctctccctggcgctgagccctgtcccagggatgtctttgaaaacttgctcccactggctggacgcagtggctcacgcctgtaatcccagcactttaggaggctgaggcgggcagatcacctgaggtcaggagttcgagaccagcctggccaacatggtgaaaccccgtctctactaaaaatacaaaaattagccgggcgtcatggcgggcgcctgtaatcccagcgctactcaggaggctgaggcaggagactagttctgtctcaaaaaaaaaaaaagaaaactcgctcccaccagacagaccctgagccccccccactcctctctgcctcactccatcccagccactccttggctactggcatgaccaagaggttgtctgcccatacatggagcctcccggcagggcctccagctgccgcccctcctgaaagccgaattcgacaggccagattctgcaggggcggtgagaccacggctcgccccagggcgggccatgggtgttttcttgacctagaaatcagaccagtgaccgtcccagcctgtgggagctgagggctggaaactgccagggacctgccagtgccaggtatagtcacagggcaggtcatgatatgcccgtgtgagccagacaccacgctactcaagaggctctcagagctccagaggtcaggaggccagaaggaaggtgccagcagagccaggctccctcctacccctccagattccggtggtggccagtggtccttggctccttggccgcaccgctccaatctctgcctccatctttttttttttttttttttttgagacagaggctcgctttgtcacccaggctggagtgcagtggcacgatctcaactcactgcaacctccaacctcccgggttcaagtgattctcctgcctcagcctcccaagtagcctgccatcacacccggctaatttttgtatttttagtagggacgaggtttcgccatattggccaggctggtctcgaactcctgaccttgtgatccacccagcttggcctcccaaaatgctgggattacaggtgtgagccaccatgcccggcctctacctccatcttcacatggcctttctcggtgggtaggggggacagggattcactttgttgtccaggctggagggcagtggcacgatcatagctcacagcagcctcaacctcccaggctcaagcgatcctcccacctcagcttcccaaataactgggactacagacgtgtgccaccacgcccagctaatttttgtattttttgtagaaacgggggtctcactattacccaggctggtcttgaactcccgggctcaagcgatctttctgtctcagtctcccaaagtgctgggattacagctgtgagtcaacataccgcgcccagcccccacgtagtcttttctttcttttttgagacagagtctcactgtcgcccaggctggagtgcagtggcatgatctcggatcactgcaacctccccctcccaggttcaagcaattctcctgcctcggcctcccgagtagctgggattacaagcacctgccaccacgcccagctaatttttgtatttttagtagtgacggggtttcactatattggcgaggctggtctcgaactcctgacctcaggtgatccgcctacttcggcctcccaaagtgctgcgattatagccgtgagccaccgtacatacccagcccccatgcagtcataaggactagggcccaccctacttcagcatgatgtcattctaactacctccacatccgcatcctaacaaattacatctaccctatttccaaataagggcctatttaggaattcagtatttttgtggaggacaccaattgagctctcaccggacaccctgagtgggggacagggtgccccatctgaccctctgccagtggaactcagcctcacactgctgtggagtgggaatcccgtagaattgtgagcccctgaagctgctgcacgccactgccacccaacgtggattctggggtgtccttgacaagactgagcactccacgggtaccagccccatctcaggtgcccagaggaaggccagagacggggctggggactcggggctcggggtcaccccactgaggaaggctgggccagagtgtggttgcatgctcccagcaatgggagcccccgggggtcctggtctcctggtgtagctggtccgcccctccccagcagggttcatgttctgctggttccaggaaaagggctgggagtatgagtttgggccctgctgtgcttccgtggacctcaatttccttgactgaccagaggggctgacctgagaggcctcctggtcttctgggggctgagggggtgatggtcctggcctccggtggggtcccagaggcctccgagaggccaaggcttgatgctttgtgtactaggggatgagaagccctagggggtctggtagggagtgctgaaggctgtgacgattaaccagattggatgtactagatgtattattattattattaattattgttatttgtagagataaggtctcaccatgtttgccaggctggtctcgaactcctgggctcaagtgatcctctgcctccacctcccaaagcactgggattacaggcatgagccaccatgcccagcttgaaatatgtttttattatggttaaagtacacatagcaggccaggtgcggtggctcacgcctgtaatcccaacactttcggtggccgagacgggtggatcacctgaggtcaggagttcgagaccagcctggccaacgtggcgaaaccccgtctctactaaaaatacaaaaaattagctgggtgtggtggcaggtgcctgtaattccagctactcgggaggctgagggaggagaatcgcttgaacctgggaggcagaggttgtagtgagtttagatcgcgccactacactccagcctgggtgacagaggcagactccatctcaaaaaataaataaataaaatacacataacatacaatgcaccactttcaccctttttcctttttttttttttttttttgagacggagtctcgctctgtcgcccaggctggagtacagtggtgcgatctcggctcactgcaagttccacctcccaggttcacgccattctcctgcctcagcctcccgagtagctgggactacaggtgccaccacacccagctaattttttttttcgtatttttagtagggatggggtttcaccgtgttagccaggatggtctcgatctcctgacctcgtgatccgcccacctcagcctcccaaagtgctgagattacaggcgtgagccaccgtgcccggtgtaccgtgcatttatgagacaaggtgttgctctgtcaccaaggctggagtgcagtggcgggatcacagctcactgcagcctccacctccagagctcaagtgatcctcccgtctcagcctcctgagtagctgggaccacaggcaaccccactacacctggctcacatacaatttttgtgtggatgtaccttttcctgcctctgtgaatgtataaaaccactgaattgcacactttaaaagaaagattttagggtgtgtgaatcatagctcaatgaaagaaaaaaaaaagttaaaaaaaaaaatggccagatgcggtgactcacgcctgtaatcccagcactttgggagcacaagaagggcagatcaattgaggtcagaagttcgagaccagcctagccaacatggtgaaaccccatctctgttaaaaatacaaaaattacggccaggcatggtggctcacgcctgtaatcccagcactttgggaggctgaggcgggcggatcacctgaggtcgggagttcatgactagcctgaccaacatggtgaaaccctgcctctactaaaaatacaaaattagcccggtgtggtggtacatgcctgtaaacccagctactcgcgaggttggggcagaagaatcgcttgaacatgggagacggaggttgcggtgagccaagaccacaccactgcactccagcctgggcaacaagagcaaaactccacctcaaaaaaaaaaaaaaaaaaattagccacgtgtggtggtgtatgcctgtaatcccagacacctgggaggctgagacaggagacccgcttgagtccaggagaccgaggttacagtgagccaagatcgcaccactgcactccagcctgggcaacagggccagactcgctctcaaaaaaaaaaaaaaaaaaaaaagcaaaaaaacttcctccagggaggatggacagggtcggggcccctctctgaaaccacctgtgagccctagcagctgagctgagccgctccccctccagggccacctgcatgtggctccagacggggcaggggctcccacgtgggacacagcagcatcccgtaaggcgcaaagggacaggaaacgcttctgatccacctcagctgcccagagcttccacctcattgcaatcaaaacactcggggcagctgagaccaagatccggcagctcccaggacaccgtgaaggtctgcgaggacccccggtttgtcccctccttcctgagcacagcggcaggcatggaacacagagagaaacatgaacgccgcggagggcatatccccagtggccaagggctggctgtcccctgccaaggcctgaggcacacaacacccgcgtatctggaagccagtattttatttctcttggctgcagagggccgctcttgcctaggcgtccacaggcgcgacgatggggctcgcggaggagtccgcagcagggcaccccacacccgggggaccggcctcggcgagaagggcacacagtggaagaccccaccaagcccggcgccacccagcagcgtggggactgcctgtccgccgtccatcccaccctccccgtcccacgacctcctcctgggctaatggcagcaacaggcagcaccccgccgaattgtccgtgcaactacccgcaaaccctcctccgggcctgaaccagggctgcattcgggccgcctctgcgcctcggtgggtcccaaccctcacggtgccacaggccacgctgcctggagggtcccagggtcaccgacgatgcaggggtgaaggtgaaggccagcgtggaggctgtgtagagaagcagccccgtcccacacccacccctgcctgcgaacttacgggcctggctccagctcctcccactccgcctccagcctggtggcgctgggcaaggacaggcacccgggcgatgggaggcgcagcgtccacaggaagcgcccccaccgcaggccgagctccggctgtcctggggcctggcccaccccactgcgcctagcgcagcccgcactccacgccctgcagcttctcctgctccagggcgcgcacgaggtcctgcacgaagcgcatctcggaggctacttgcttggccagcgcctcgtagcggttctccaggcggctgaagcggcgcttgaggccgctggtccccagcagcgcgcccttggcctcctcctgcgcctgccgcttgagcgcctcggtcttgagcagctcctgccgtagcctccgcaggtcctggcccaggctgtcgctctcctcgcggtaccaggcctccttctcctcgtagatggcggccagcgcctccacgtcctcgtggcagagccgccggctgcgctgcagctcgcgcaggccctcctcggcggccgccgcctcctccagcaccttggagaagcgctcgaagtcggcgtagctgttgttgggcggcaagctggagtgcgacttgatggtgtactccttcagacgcgtggtcttcaggcgccgccgctcgggcttgcggccgctgtcctcaccacgcacgttccgccgccggatcgcctaggaaggagggaagcctgagcggggtccccgcgatgccacccagccccgccagcccccacctgccagtgtgaactgaggttcaggggctcatccggcagcagagtcaacgcctcgtgacggagactgcccagcccgacgcaaagccgagagtgctctctcgagaaaaacgctgcggccctggccccaggagtcagccccgttggacacacaccagccaaggatgccaccaggtctgtcgggtgctggacatcccacgcccaggacccaacccccgccacacaggctcactcctctggggaccctccccagccactgggggttgtcacatccacaagccttaaatgctgaaggccccccgggaccccagcgagaaggccaaggcgggaagcccagggagctcccccacctccccacttaccttaatccaggaatgttccaggctctgggcaatggtcattctccgcctggaagacccccgctctggttaggtacacctgcaccatctgtcccgtcctcccgtgaacaactgactcccgggacccccaaaagccctaaagtcgccccccagcctctgctcagccaaccacagaagctgaacaagggtactgcagggagcgtggggttttctggggggtggtggagagagctgagacctcaggctggagtcgcaaacccaggcgcccgagagagggactgggcggccatggaggcccggggaggcctacgagtgagggctcagcactgccagaattctaagtgtttacaggaaaacaagtgacctggaattttacatggatccttactttacacaccggcaactaattaaaagtttgctaaaaacacagcaagcagccagacacggtgtctcacgcccgcaatcccagcactttgggagaccaaggcaggcaaatcacaaaccaaggaggtcaggagttcaagacaagcctgggcaacatggtgaagccctgtctctactaaaaatacaaaaattagccaggcgtggtggcgggcgtctataatcccagctacttgggaggctaacgcaggagaatagcctgaacccgggaggcagaggctgcagtgagccgagatcacgccactgcactgcactccagcctgggagacagagcaagactccgtctcaaaaaaaaagactccgtctcaaaaaaaaaaaaaaaaaaaaaccatggcaatggccagcttgggccaccagtttatcagtttactctctccagcccaaggggtaagcaatgtctgatccccagccgcagggaggtggcgctgggaggagagtcctctggagcctccgtgggtggagtgggcctgtgtcccatgtcccaccccgtgccccctgccggcccctcgtacttgggatctttgacgagcagccggcgaatgaagtccttggccagctcgctggtgttgctgaagtactcctcgtcgaagtcgtagttcacggctgagatgttggtgagcgtctcctgcttggtctcgcccaggaacggggatgcaccgctcaggctgcgagacaggcgtgggggctcagtggggtcctgggctcccaccacggccgcgccgcctctccggctgcccacgacaggcggagcacagaagacaggctgacggcaggtgcctgggccactcacactcctgagcccttagaaccttcctgcaacgatcccagacaccacccaagaggcattcaaaatccacccccccaccccgccactgacagcagcagaaatgaacaggcagaagtctccttggagactcgaagtatctgtgcagacgcagagcccgaaagcccccagtgctcagtaacgccgaggggagggtaactgcagtggggagcccgagccaacaccttagccaaaggatcaaggtcaacagcccggcagtgagaggccccaacagcgtctgcctcccagcctgacgctgggagggtgacacagcatcatccctggggttttgagcagagacactgaagccccgtctgatcgtctgatcgtgacagcgcacgagactaaacgtggactcagacgccttctgcaaaacacctgacccgtgagcacaagtcagggtcaaggtcatgaaagccagacagaggaacagcctcagactggaggcggcgaaggagctgaatggctaaatgccgtgtggggacctcagagaggacaggagtggaaaacgggggtgtctaaccacctctggcactttaaattttttaaattttttagagacggagtctcgctctgtcacccaggctggagtgcagtagcgcgatctcggctcactgcaaactccatctcctgggttcatgccattctcctgcctcagcctcctgagtagctgggactacaggcacccgctgccacacccagctaatttttgtatttttagtagagacatggtttcatcgtgttagccaggatggtctcaatgccctgacctcgtgatctgccctcctcagcctcccaaagtgctgagattacaggcgtgagccatcgcacccggcccatctagcacttttgtgattagcgtagcaccaaggctaacgtcttggtgttcataacgttcgtgttcatgaaaaatgtaaactgaaggaggaggaagctgcagggggcgtctgtgctgtttctgttgctcctttgtaagtctgaattatctgaacatttaaaaagaatacaaacggtctagcccatctcctgaagcctttgggtccgctcacgcactacagcgggctgggcccacgccattgtttatttccttgcttactgaatgagctatgcccattcaatatggctgggcaacacagtgaaactccacctctacaaaaacttttaaaaattagccagctgggcacggtggctcacacctgtcatcccagcattctgggaggccaaggcggccggatcacttgaggtctggagttcaagaccagcctgaccgaaatggtgaaacatcgtctctactaaaaatacaaataattagccaggcatggtggcaggcacctgtaatcccagctacttgggaggctgaggcatgggaatcacttgaacccgggaggcagaggttgcagtaagcctgagctgagacggggccttggcacttcatccagcctgggcaacaagagcgaaactctgtctcaaaaaaaaaaaaaaaaaaaaaaaaattagccagctgggtgcagcggcccacgcctgtaatcccagcactttgggaagccgaggcaggcagatcacctgaggtcaggagttcaaaaccagccttgatcaacatggtgaaaccccgtctcttctaaaaatacaaaaattagctgggcatggtggtgggcgcctgtaatcccagctactcaggagactgaggcaggagaatcgcttgaacctgggaggtgggggttgcagtgagcagctgagatcgcaccactgcactccaacctggacaacaagagcaaaactccatcaaaaaaaaaaaaaagtccgagcatgggagcatggttgtgtgcacatgtagtcccaggtactcaggaggctgaggtgggaggattgcttaagtctgggaggtggaggctgcagtgagctaggacagcactccagcctgggcaagagagtaagaccccgtctcaacaaataaaaataataaacaacagcaggcccacgtgtggcccagggacaggagccaaaacccagcgtggggtcggaccccttccttgcacttcgagaggaggctgggctccctagcagccagagggacaggagcacacacgacccccaacccggagcctgctcagccgctctgtgagtgtcctgccttcagaactctccagaagcctctgtgacagcagccacagagaatcactcatccgttcacccggtatcccctgagtacccgcgatgggtcacagccaggctggggacccctggcgtccacatgagacacacggagccggggacccatgccagctgtgttgcacagccgagggggcccccgccaggtactcacaggatataggtgatgacaccgatgctcctggggacagacaagaggcaagggtcagcgcagcgtggggccgcccaccctcccaggaccgtggcgtccagcgcccctgttctagggcaacggtccccccataccccaacagcagcaaggccccgcttcatccccagctgcagcactggcctgcgctccaggaatgcagggaggcccggtgggagcaggtggtacactcaccacatgtccgcctccaggcccagcggctcatagttcacaatctctggggctgcagaacagggagatgtgggtcaggcactggggacatgctggccaaggaagaggctcaagacacaggcatggggtcaaggttctcacatgtcgcagcccttgggggcatgaatgcggcagagctggccctcagggcctgacgggtaggacagcggggctgcaccaaatggaggcccagacctcccgcaaagccgggcccaagaggggtggcttcagggccgaggacgcggcacccagcaccgggcatgacccaccccacgcacagcaggcagccccagaccaccctccccaggccggggctgcccactgggcagggcctcacccacaaactccggggtgccgaagatgttcttgaactcgttccccgcctcgatcttgtgcgcgatgccgaagtcgatgagcttgattcgtgggttgggcacgttcttgtccagcagcatgatgttttccggctggggtgggaggaggctcagcagggaaagcacgggcctcccccaccctcacccccacgctccccaaacctcaccctcacgctccccgcaacctcacccccacgctcccccaacctcacccccacgctccccaaacctcacccccacgctccccacacctcacccccacgcgcaggaggtgccttccaggctcttccccgccccatccccacccccacactggccaggccggccccacagggccctacagggctcaccttcaggtcaaagtgtgcgatgcgcttagagtgcaggtagtgaacgccgtccaggatctgcttgaggaactgggtggcctcgtcctccgtcagcgactccttctccgccaggaagtcaaagagctccccgccagagaccagctccaggatgaggaccacgtccgtcttgttctcgaagatgtcgtgcagggtgatgatgttggggtgccggatctcccgcaggatgttcacctcccgctcgatctcctcccggctcaccccacgccggctggatgacaggcggcgcttcttgatgaacttggctgcgtactccttgcccgtgcccttctgccggcacttccgcacgatcgcaaactggccgctggaggagggggagggagtgagtgggggtggaggaggcggagggagtaagtgggggtggctggctccccgtcacctccacttgctcctcttgggcgcggccctgcaccaggcacttgaaggacatgagctggccactgcgggggtgcagactctgcgccttctcagagagcaattccttagcgccccacaccatcagacgcggcgttcccacccctcccagggctatgcccagcaggtgtgtggaggggagtgcagagccacacgttaacaccatggcaccggcgtatttttgaaaagtgaaagaatgaacagttcaatgcatatcaagagggaactgagggggccaggcgcggtggctcacgcctgtaatcccagcactttgggagttcgaggagggcagataacttgagctgaggagttcaagagcagcctggccaacatggtgaaaccctgtctctaccaaaaatacaaaaaattagctgggtgtggtggcgggtgcctgtaatcccagctacttgggaggctgaggcaggagaatcgcttgaacctgggaggcagaggttgcagtgaactgagattgtgccactgtactccagcctgggcaacgtagcaagatcctgcctcaaaaaaataaaaagtgcaaggcaagtgccagatccgctttttttgtttttgttttgttttgtcttgagacagggtctggccctgttgctcaggctggaatgcagtggttcagtcatggctcactgcagccttgacctcctgggctcgggcaatcctcctgcctcagcctctcaagcagctgggactacaggcacataccaccacacccaattaatttttttttctttttgtaaggatgaggtctcactatgttgcccacgctggtctcgaactcctgggctcaagtgatccctcccaagtaggtgggactacaggaacacactaccacacctgatttatttattttttgtagagacagggtcttgccgtattgcccaggctgctttggaactcctggcctcaagagatcctcccactcccccaccccaagtgttggcagtacaggtggagccgctacatctggccagtatccgcattttaaagaaaccaaggctgagaaaaggaaagcaactagcccaaggtcatgcagtcagtcagtggcgggaggattcaaaccttcaaaccaggtgctgcaggctccagagcccaggtgctctaacaggaagcagacagctgctgctgggtaccgggttcctgcgtgcctacctcccggctccacgctgtctcctgctaacagacccagctgtcccagggcagcctttgccgctcactctcagtctgtgggactcagtggcccaggaaaggggtggaaggggacacgactggacctgggcaagcagaaaaccacgccttccagcccaaagagaccggtccagtccacagggctctgaacgcctgctgggaagagaggatctctctctccctctgctgggcttggatccaggctcgcggcaggggccaccacgtagaaggctacctaagaagcctgcctaagaacagaccaggccaggagaggggagccaccaggcactgcgggtggcacataagccccgtcattcactctgccagggcgcctcctccatgctggagtggacttcggccccggggacacagggcaccatatgcaccagcacccagtcacacctgcggccgctgcacacctggacaacctggttctgtaaaccacgcctttccctgttttgctattgccaaccagatttcaggttctgccactgagtcctcctacagcaacagcagaccacagccgcccacctccagacagcccccggtctcactggccacagacttgctccttagaggcaaggccactggcaggctctcagttcctctacggaatgtgaaacgtgcctcatctccccagccgggaaagaaactccccaagagctgagcccaccctcttcgcttctctgtaacttccccagcccccagcgcaggtgggggcacagcaagccctcctcagtgatggtctcaggtgtcactcccaacccacttcctaagtgcctgccacaacccagacacgacccaagcgtggcctacacaccgacaatttctactgatagagttcatgatgtttaaaaatgcgggctgggaagccgggcacagtggctcacgcctgtaatcccagcactttgggaggcaaaagcgtgcagatcacgatgtcaggagttcaagactagcctgaccaacatagtgaaagccacgtctctactaaaaatacaaaaacattagccgggcgtgctggcaggcatctataatcccagctactcgggaggctgaggcaaggagaatcgcttgaacctgggagacggaggttgcagtgagctgagattgcggcattgcactccagcccgggcgacactgcaagactccgtctcaaaaaaaaagtgtgggctggggccaggcacagtggctcacacctgtaatcccagcactttgggaggcagaggcgggcagatcatttgaggtcaggagttcaagaccagcctggccaacatggcaaaaccccgtctctactaaaaatacaaaaattagctgagcacgttggtgggcgcctgtaattccagctacttggaaggctgaagcaggagaatcacttgaacccgggaggcgaagattgcagtgagccaagatggcaccactgcactccagtctcggcaacagagccagacaccgtctcaaacaaacaaacaaaaattgctacattctgggccttcatcttgcacttcatgtatctctgagaatgttccagaccactacctgaagcagtgccgtcagaacagcagacactggccacccagagctgtcaaacccgtgaggtgtggccagtcccgagaaaaactgcgacatgaaatacacaccagacctccaaggcttcacggcaaaaacagaaggctaaatactttttttaaaattatgaatttctgtttgtttgagagatgggggtcaacttatgttgcccaggctagtcttgaagtcctgggctcaagcgatcctcccgccttggcctcccaaagcgctagaattacaggcggaagccgccgcacctggccctgcctggttctttttacaagctgcatcctattccagccctgatgcagtggtttggggaaggccatttaagaggctgctgttcccagcggggtgcggtggctcacgcctgtgatcccagcactttgggaggccgaggcaggtgaatcacctgaggtcagtagttcgagaccagcctggccaacatggtgaaatcctgtctctactaaaaatacaaaaattagccaggggtggtggcgggctcctgtaatcccagctactcgggaggctaggctggaggccgaggctgcaatgagtcgagatcgcatcactgcactccagcctgggcgacagaatgagatagtgtcaaggaaaaaaaaaaaaggctgttattctggtaaacgttctagcaactaccccagtcttaagtcattccatccatgtatgtacagttttccaatgaattaattcctagaggtgaaatcggcgagttaaaagaaatttggctgaattttgctgacttttgccaaacgacccctagcaggaggggtcaacactgaagcatgagaagggggaggagggagcatgctttctctgccactaacgaggaaattcctgaaggagggacctcaggatcccaaaagagcctgcagcactctccctagcctgacacagagctcacttatttacattcccttctggtgacatcatggggaggctccagggaggctggccagtagcaaactcaccaaataaggctggaggctctacaaaaggaggcagggcctagtggtgcctggctagtctggagggggtggggccccagggggaccctccaaggcccagacaggcaggaaatcagctgcctccctggaagaggaaacctctgctttttcccacaagcatgttaaacaattgaccgaggtttgggcccagctgggagacacgcccctccctccccccactttaaacatccaagagctgggcaaaaaaactaaagtgcctcccacaaaagaggattaacacagggagatttttttttttttaaataaatggggtttcactctgttgcccaggctacagtgcagtggcacgatcatagctcactgcagcctcctccaactcctgggctcaagccatcctcccgtctcagcttccctagtagctgggactacaggcatgagctaccacacctggttaattttttttcatttttattttttgtagggatggagtcttgctatgttgcccaggcagaagacacatcttttaataacaaaagcagctggcatctgttgctctggtgccccatgccaggcacggtcttggctgctgtaacggctcaattacttttctccccacaggaaacacacagaggattcccaagcaggaattcacagccggggctgtctgactccacggcccaaattcgttcccccaccgcatgatactgactcattccttctcagcatacaggataaagaacaggaaaggagagctgctgttcagaaaaccccacagcgcctctctcctatccctggagcccagccgtgcgggcagacagctcacctgcccagctcctcccccatctcataatggtcctccacgtcctcctgcctgaacgtggacatggcggccggtccgccttccagcagcttccactccagggaaagtgcagtcaccgcagcctggagataggacctcaggagtcccctaatggcaaccctggagaagacagggaaagacagaagtgaggaactgagacaccacccttttctcctagattaatggacagacctgtccagcaaacacaagcctcccacctctccactctgaagctccaaactcgacaaaaagaggtgctgtgtttactgggctgggtcctgtcatgtcacctcttagagccccataaccactcaaaagtttggtaacagccccactgggccaccttcaccccgcaaaactctctccagacacataattctgatttccccgacgctgcctgcgtctttttttgcctctcactcctagacttctctcaacctgctcagccaaaatcccccaccattcctgcacgttctcctcaacctcaaatcccagggctaccttactccctggccaatgtcttaacgaagttctcaagtctacttcttttgttgttggtgttgttgttttttgagaaggagtctcgctctgtcgccctggctggagtgcagtggtgcaatcatggctcactgcagcctggaactccaaggctcaagcgatcgtcccaggcctcccaaagtgctgccattccgatcaaaattcccaagttactaccttaacccctcctggtccttgccctcggcaggtctcttaagaccctcatcgatggaacacccccgcccacccccaaccatctctgactccctccaattctgaattttccaagaaccggacgacgccttccacgctcctgaaagcccactttgcctccctcccccgctgacctccactgtcctcgcaagattaacctcttcctccacgctccatgtatcaaagtcccccaaccgccgtctcccctaccccccaaaacgggccgccaaaaagggccccatctgagtctcctccaccgtcctctgccccttctcgcccgcaatctccgcacaagcccctaggcagaccccagtggctccctttgcagaacctccccccgcccccaaggccttgcccatccctaaggctccgctccagcatccctggggccgctacgcccctcgcacgcccggccgagccctttccccggcccggtcacccagatgggtccccaaacctaccagctcctcagattctctccctccctcgtcctccgcgggcccccgaagcgccgctctggccccacccagccctccagcctcggcccgagcccgctctttaccctccgcagcccggagaatacggccggcgccgccgcgctggccaccgccgccgcctccagaagccccgcgcccctgccgccgcgacgcgcctgcgccgacgtcaccgcacccgccagtgcccacccccgggaaacgaaccccgccgcctattggccggtgcgcccgccgctcgtgccgcacctcgacgtcccgcccccagctgccttttcggcacccacacccggatgcagcctcaccactggctgaacactcgccatccctgatttcattggctgcagtcgacgctggtcaagcggacggaaaaaaggccgacttccggtcccttcatcgccccgcccgcctctcctctgacccaggtgctgaagctgcgagaagtgaggctgaagccctgcatcccgcttcctgccttcctggagcaccggttgggcgaatggatggctcacctgtggccgagcgcgcctggcagctcctggagtggaccctgggactgctttagtccctatgtggcagtttcctccactgaaaactgttacccacattctaaatacttaaaatgcaaatgaggtcaatctggggttgtcatacacagggtccctcttcgtctcaaaatagagggtaacagcaagcattttattgagacatagtatgtgccaactgacaacactgggaggtatcaggtttgttttttttttaattttattttttgagacagggtctcactctgtcacccaggcaggagtgcagcggcggtatccagctcactgcaacctccacctcccgggttcaaacgattctcgtgcctcagcctcccaagtagctgggattacaggtgcccatcaccacgcccggctaatttttgtatttttagtagagacggggtttcaccatgttgcccaggctggtctcgaactcctaagctcaggtgatccggcacctcagctttccaaagtgctgagattacaggcgtgagccattgcgcccggcctaaattcattttttattattattttgagacggagtctcgctctgtcacccaggctggagtacactggcacaatctcggctcactgcaagctccacctcccaggttcacgccattctcctgcctcagcctcccgaatagctgggactacaggcgcccgtcaccacgcccagctaattttttgtatttattagtagagacagggtttcaccgtgttagccaggatggtctcgatctcctgacctcctgatccgcccgcctcggcctcccaaagtgcaggaattacaggcatgagccaccttgcccagcctttttttttttttttttttttttttgagacagtctccttctatcgtccaggctggaacgcagtggtgagatctgggctcactgcaatctctgcctcctgggttcaagcgattctcctgcctcagcctcccgagtagctgggactacaggtgcacgccaccactcccagctgatttttgtatttttagtagacgcagggtttcaccatgttggccaggatggtctcaatatctgtgatccgccggcctcggcctctcaaagtgctgcgattacagacgtgagccacaagccggcctttatattttttatttacattttcaacgtacaatgggttggccaggtgtggtggctcacgcccgtaatcccaacagcttgggcagccaaggcgggcaggtcacttgaagtaggagttcaagaccagcctgctcaacatggtgaaaccctgtctctactaaaaatacaaaagttagccaggcctggtggcacatgcctgtaatcccagctactcgggaggctagcgcaggagaattgcttgaacccaggaggtggaggttgcagcgagccgagatcatgccactatactacagcctgggtgacggagggagactccatctcaaagaaaaaaaagtggcagggcatggtggctaacgcctgtaattccagcattttgggaggccacggtgggcagatcacgaagtcaggacatcaagaccatcctggctaacacggtgaaaccctgtctctactaataaatacaaaaaattagccgggcatggtggcgggtgcctgtagtcccggctactcgggaggctgaggcaggagaatggcgtgaacccgggaggcggagcttgcagtgagccaagattgagccactgcactccagcctgggtgacagagcaaagactgtctcaaaaaaaaaaaaaaattcagcttccacataccatcttaacgtttgcactactaaaaaagaataggacccggtatggtggctcacacctgtaaccccagcactttgggaggctgaggcgggctgatctcttacggtcgagcttgagaccagcctggccaacatggtgaaaccccatctcacctaaatatacaaaaattacacagacctggtgataggcgcctgtaattccagctactcgggaggctgaagcacaagaattgcttgagcacttgaatccggaggcagaggctatagtgagccaagatcacaacactgcactccatcctgggcgatagagtgagattctcgaaacacagtaatccgttaccctgactgctggaaacagcgtcagttacagccccaattcaaatgcgacagccaaaccaaacctcaggcatacctacatgtgggcaaaacctcagctgaggcttggccttgacaatgcagggccagagctgcccccgcctttgccgagaaccccacagccctacttcacagtccccacctgccttcctgaggacagagtaaaaggcggaaaatgatcatgttaaccttatcagcactgacaagattaggcctcctcacatcttaggcactatttagaaaaacaaatagttttctaagctattggcgctcacacctgaaatcccagcactttgggaggctgaggcagaaggatcgcttgagcccgggaaggagaccagcctgagcaacatagtgagaccccattactacaaaaaaagtaaaaattaggtcagcacagtggctcacgcctataattcccagcactttgggaggccgaggcgggtggatcacgaggtcaggagatcgagactatcctggctaacacggtgaaaccctgtctctactaataaatacaaaaaattagccgggcatggtggcgggcgcctgtagtcccggctactcgggaggctgaggcaggagaatggcgtgaacccgggaggcggagcttgcagtgagccaagattgagccactgcactccagcctgggtgacagagcaaagactgtctcaaaaaaaaaaaaaaattcagcttccacataccatcttaacgtttgcactactaaaaaagaataggacccggtatggtggctcacacctgtaaccccagcactttgggaggctgaggcgggctgatctcttacggtcgagcttgagaccagcctggccaacatggtgaaaccccatctcacctaaatatacaaaaattacacagacctggtgataggcgcctgtaattccagctactcgggaggctgaagcacaagaattgcttgagcacttgaatccggaggcagaggctatagtgagccaagatcacaacactgcactccatcctgggcgatagagtgagattctcgaaacacagtaatccgttaccctgactgctggaaacagcgtcagttacagccccaattcaaatgcgacagccaaaccaaacctcaggcatacctacatgtgggcaaaacctcagctgaggcttggccttgacaatgcagggccagagctgcccccgcctttgccgagaaccccacagccctacttcacagtccccacctgccttcctgaggacagagtaaaaggcggaaaatgatcatgttaaccttatcagcactgacaagattaggcctcctcacatcttaggcactatttagaaaaacaaatagttttctaagctattggcgctcacacctgaaatcccagcactttgggaggctgaggcagaaggatcgcttgagcccgggaaggagaccagcctgagcaacatagtgagaccccattactacaaaaaaagtaaaaattaggtcagcacagtggctcacgcctataattcccagcactttgggaggccgaggcgggcagatcacttgaggtcaggagttcgagaccaaccaggccaagcaaaattctgtctcaaaataaataaaaattagctgggcatggtggcacatgcctggagtcccagctacctggcaggctgaggcaggagagtccaggaggtggaggatgcagtgagctgactgcaccactatactcatctgggagacagcaagactctgcctctaaaaaagtgtttacaaggccgggcacagtggtacaatcccaacgctttgggaggccaaggcgggtggatcacaaggtcgagtgatcaagatcatccaggccaacatggtgaaacctcatctctactaaaaatataaaaattggctgggcgtggtagcacacgcatgtaatcccagctacccaggagcccgaggcagaattgcttgaacccgggaggtggaggttgcagtgagcagagatggtgccattccactccagcctagcaaacggtgagactccatctcaaaaaaaaaaaaaaaaaaaatgggtttctaataaactagtcaggactggggtgaccacagaaaatcctgatggcagatagaacttgtgagctcgtcagcaattcggaaagttgctgaaacctgcgaagttcaatccagagcccctcgctccacagggccatccaaatgcgttcaaagtgacatctcgtaattccttgccgcactgatcctacttcaaatgctcagcagacccgcgcagctggcagctgcttctctgaatgacacaggggtagggcattcccaccattccagaacgttccacctaacactgaggcagccccaggctgcacctaactagggcccgggtccccttctaggctccagggagcccagtactgggcagccccgctcccctgcgaagacaccgtgaaaaatgcagaacagagtcaccaccttatcaaatttattattccaatggcactagtacagctggaggtgctcatggtgacaccgcacaggacttcctgcctgctagaaatcatctacccgcgtgttcctttcccctttctggggcaaaagccactgcgggccatgtacccaaataaacctcttaatgcgtttgttaaaattagtttggacatctgagtttccctctgaagaaatggaaaaagtgttgggtgtcccatcccgcctccccctccccgaccggcccattaagtccctactaagagggcgtgtctgctgcctccggactctggaaataaatattgaaagaaacggcatcaagtgttatggttgagtgatggcacgcagcgggccccagaaacctctcaggggagcgtcgctgtgtcgggacagtctccaggtgtcgtctgagaattcgaggacgtggtgctgtgggtgctgcgagtccccggggcggcaggcgctgcaggaagggccgcctacaatttgtccaggaagttgtccagggcagggatgccttctttcaggcccttgcgcttgcgggtctccgccaccacctggctggggcggctgctgttgtcgaaggggtctccgggcaggatctgccagtggtcaaacacacactgggggaacgcctggccgcccgtgttggacctcaggtcagcggtgaagcctgcagagggaagcgagaggctcactgggccatcgagaaggtggcagggcagaaggaaagtcctgtcaggagctcaggctagttcctcagcctgagtcaccctgcagaccagacactcggcctggtgcccagcacttcacgaagggcctagcaggccactcatgggcctcatgccgctgctcgtttgggacaaccctgtgctacagctcggctgctctaccggcccagggcgtaggccttcagagctccaggcccagagcccttctcacactggggataggagagcccctcccctgggaattcagtgatttagggggtccacaagctgtcagaaactggaccacctgctccatccatcacctgctcccatcaggacgcctcctttaacaccttgctaagcttaactgggcttctgtcccccaaaccagcctgccaggctctgcaggccacaccgggcaggcactcaccaaaggactcgttgacgggcagataggccttgaccacaaacatgggggtgccggccacctgggactcctcgaacacgtggccccgcttcctgttcaaaaccccgtagatgccaccgaccacctgctctggacactgccagaagggaaagaaaacctgtcagtggccgctgggcaggacggtggcagggtcagcggtgggcgggtagacctcacctggatctccacaaggtagatgggctccatgaggcgtggctgggcggtcagcacactggcatagaggcagcgccgtgctgtggggatgatctggccccctccgcggtggatggcgtcggcgtgcagggtgacgtcgtggacgtcgaagcgcacaccccgcatgttctcctcacacagtgcgccctgggggagggggagagccaccgtcaagggccggacacacctcggctgcttgccctccacctgccaagtcctgcaggtctccaccagggggacctggggccttgcccgccttggccccattagggtctctgtctcgggaggcaggaccatgaggtccctctagagcctggaaacgggtgtggtctgcacatgctgagccgtgcctcacctccttggtggcccactggaagccggccaccacactgtccttgatctcgttgaggtactgcacacccttggtgatgtcggtgaggatgttggggccggtgccgtcgggcccaaagcaccagatcttgcgggcctcagccacgtcccactcgtacttctcggccaggtagcgcgcccgctgcttgagctcctgacgggcggacacctcgcctttatcgatgtcctcggccaggccgtcggggaagggccgcgccttcatgtacagccggttgtgcttgttgggggacttggagaggcagagcacgttcgactcttcactgaccgtctcgcggtacgagacgaccgggtcagatttctgcaaaaagaggttaagtcccactcttgcctggagaaagaggtgaccttacacacagacgcatccttaaaagcttttcctagcaaggcggacctcatacagcctggtagagccacgtcaatcagaacgaagcggagtcagtgttgcagtgccaagcgcatctcactccagacaaggacaaggagcaggggctccactgagctctccggcgcagaaaccacgggcttgtggaattttaagcattaacagggaagaaacgaggtctggagcaggcctgtcccaacccctccagagcatttgtgttgtttgtggacagaagacagcaggatgtaactcaaaaactgccccggaggccgggcgtggtggctcacgcctgtaatcccagcactttgggaggccgaggcgggtggatcacgaggtcaggagatccagaccatcctggctaacacggtgaaaccccgtctctactaaaaatgcaaaaaattagccgggcatgatggcaggcgcctgaagtcccagctacaggaggctgaggcaggagaatggcgtgaacctgggaagcagagcttgcagtgagccaagatcacgccattgcactccagcctaagcaacagagcaagactcttgtctcaaaaaaaaaaaaaaaaaaaaaaaaaaaatagccctgggccaggcatggtggctcacacctgtaatcccagcactttgggaggccgaggcagggggatcacgaggtcaggagatcgagaccatcttgacttactaacacagtgaaaccccgcctctactaaaaatacaaaaaaaaattagccgggcgtggtagcacgcgcctgtagtcccagttactcaggaagctgagtgaggcaagagaatcgcttgaacccgggaggtggaggttctagcgagccaagatcacgccactgcactccagcctggatgacacagcgagactatctcaaaaaaaacaacaacaacaacaaaaacagccccacatgcctgtggaagactgcaaagaagaaacttgaggaacttaagaagctgagaccaagaccgagatcaagtctaggcgtctgcagagcctagctcagctcagctttaaagcagagggcaggtgtccggggtggggcgtggggaaggctggtcactggcgcctcaccttgatggggatgcaggcgtggtcctcctccaggtccttcaggcagatctccaggtgcagctcgccggcgcccgcgatgatatgctctcccgactcctcgatgatgcactgaaagggatgcgggtcagcaccaaaggggtaggcggctcggaacaggcgggaccaggctcccagcttccctttagctagggaccccgccagaacaagatttcagggaaggtgctgggaaactgggaccagcacaaactcctgaagaaatgttaagtcccacaagctacagtgaacacgcgcagagcagcctaggagagggtggtggctgcctgggcaggagtctccatttacagccacagccaagaacccctcctttcatgaccagtcaccccaatccaccaaccacagcaacccacacagccacaactcaggacacaagccgtcccccctcagggtgtctgctcccagcaggtgcactccgtgcccacctgcaccatggggtcggacttggccagccgcttcagcccctccaccagcttgggcaggtcagccgggttcttggcctccacggccactctgacaacagggctgacgctgaacttcatcacccgcatgttgtgcgcgtgctcgaaggtggtgatggtgcccgtcttcaccaggaactggtccacgcccacgaggcccacaatgttcccacaaggcacatcctcgatgggctccacgtagcggcccatcatcaagattgttctggaagaagcagaaggcggcagcaggccgcagggatggttgtgctggaccctggagggccagggcaggtccctcccggagttggtggccctcctgccaggtcccagggcagactggtggcttccacaaggccctgactgctgcgtcggggctgtcaggaaacatcctcttcagaatcactgccctcctccctgggtatgggtcgacggccgccacccacctgtgcccagggacacagatgagcaggggtgtgctgtgccctggggcttggagcttctccagaaatgccctcactgggctaagaacaaaagttgtggctggcacaagtatcaccctatattccttctatgctccttacttctagctcccgactgaggagcccaagacttggagcagggcagggcccgcaacagtgccaaggggcctgcacatcacccagctgctcacctctggattggcttcaggtagaggtcctccttcttcccaggggtatagttgggccccatgatcctgaccttcaggccagtggagaccagccccgagaagactcgtccaaaggcgtagaaccgacctttgtcggaggttggcaccattttggaaatatacatcataagagggcctttggggtcacagcttttaatgcctgagggacagagaaaacccgcaagctttattccagtgcagctcagccttctggaaccctgcaacccacaaccttgggcaacaggaagtcatccggctgcatctcagggcccggccaccgggaccacgtacccatggcagcctcgtcgtccgggggcccctcgtacaggagctcgcagcggtacttctgggccgtcacaggggagggcaggtggatggtgatcatctgcaacaaggcgtctccggcaggcagccagcggcgcatcacagcctgcgggggcagagagcggtgcatgagacacctggggagcccaggatggccccaccccgtacacgcttcctctcttgaagccaaggaagccaaagtcaggactaacgttctccaaagcacagtcccttctggaaggcggcaaaggccatgcacactcctgccaaggccctcacccacacctgtcccggatggggctggctgctgggatgtgtctccagcagcacccagagtctaaagcgaaaggggcagcagctgtccctgcccagctgaggacttcagcccccaggcctgggctgtcagagcatccggaaacagcagcctgtgttccctccaccccgagggctgggcccaggccgcaccttcagcaggggtttgccttctttgtccttgtcctcgctgtccagtttgatgtccagtttctctatcagttttgctgtctcctctttcttgaaattcatgatcgcatcaaacacctacattccccaccaagaaacaagaaagcccatttgggaacagcaggaggaagcctggcactgcttcctgcttggaagactcaggtcagcgcagggggacgcagcacgggagcaggagcaggcctggcctgcctaccacgggcccagccagctgagcggatcgggagctggaggaaacctcgtggtggagcagaggaaaaagcccactctgactcagacaaggacccaagttctgacttacaagcactgaaccgccaaagccacaagttattcaaccccctcaatgcaggagaggtcccaaggctctggctatgcagtccagatcttaagagaggagccctgactccacctcagttaggagctgtgcctcctcccatctcgcatctgccccacaaggagacgggcccagtcagccgacaggctaccggccggagcccacagggccgagggccaatagtcgcatcggcggggtgcctggcgcagccctcactcaccttgaagatggggtccaggatcagctggcagaaggtgcgtggcagcttcttcccttcggggctggtggctgacttgctgaacttgccgttggctgggtcaaagtacctggcaaggagaggccaagccaaatcaagttagggtctccaggggatgacttggggagggtggtcgccaaggggacatgcttgggcaagacctggtgggcttgagccacgctgtgaatagcacaccacgcccctacgtcgctgccactacccccaggtgtcaggaatcccccaccatatcccgcggggctcacctgtcaccccacagcttcttcatcatgtcctctactttcttggcccgctcggcaggccccaactggccctcccccttggcggcgaacttggccacatacatctcggcaaactgcttcagggtgaaggcccacccgtggaggccagacccaaagcccacggtaccgaggacaggatcgatctggaagtgtgagaaacgagaagcagccgtgagggcccctgcgcagagcctgaagctacgggctgggcgccttgggcatgggcctcagacgcaggctttcttcagtagacatctggtcaaagtgaagaaatgatcagtcatcacgaataggggggccagcccctccaccacccagggcagcgttccctgagctcgtctcttccagctgcccaaagatcaagggctgggtcaagtcggatgaaaacattccagcccccttctctgtcacccaacattcctggcaaaaacacacttccagtccccctcagctcaactccactccccaccggctcctgcagatcccgctgcggcaagcccaccacccagctagggagggccgtaccatgatgttgcccatggggccgctctcgccctcgccgtaggtggagatgatgacgttcacgttctccacgatgcgctggaaagtctggtagagctcctcgggctccagctgcagctccagcagggcgcggtccatcttgttcatcatcagcacaggcttgatgcgctcggcaatggcctgccgcagcactgtctccgtctgcacgcacacgcctggggacacgggggacagggcggcgctgtcatcctcaagcaaggatggcccccggttccaggccgtgcctcagggggacccactgcttacctgacacgcagtccaccaccaccaatgcgccatcggtgactcggagggcagcagtcacctccgaggagaagtcgacatgcccgggggagtcaatgaggttgatgaggaagccggcaccgtccttgctctgcttgatgaagttcaagtcattctccgagagctcgtagaagagggagatggcactgatggagggagggactcgtcagggggacaggagccacacacctggcccagggagtctgggatgctgtcagaagccaggctgctcctccctccatgactcatccctggagaggctcccacaagagccaacccacccttgtcctttgcctctgtccgagacatgccacccccatgacagggaactcctggtaccagccccatagccagatcctcagagccctcctgaccagacatcctgccccaccgacttggtcccaagattcatcacacctgactcaaagtagcaactaaaagacccagcaggacggcaaaagcctccagagactccgaccctcccctcctcacttctgcccctgctccaggggaaatgaagagccttagccagagtccctcaccaatgtaccaacccaggacaaaaagcagttggggtcaccgtactctgcgctccccctactcatatcggggccagaaactgacatggaatgaacatcatccagtgcaacacaggagcttcccagcgtcccaagcactagaacaccctcccctcccaggtgtgacagccaaacctctccagatattgtaggagtgggggcaagtcccccagggagggagaaccacggagttaagccccctcctcaagaaaaccttccagctcgcagtaccccgaatccctgtgcctctccatcctgtctcgctggactgaacctcactcattctcccatgaattaagaaaccaggggaaagagacgttgccaagtctctccccgcgcaccctggcccagtggcctccagctgccaggccagcacctccctgcctgggtacagagggcacagggagctcacgttgacttgatggtgatgcaacgctcctgctcgtccttccgggtatcagtgaagcgtgtctccccggcccgggccgaggcgatgatgcccgccttgcacaccagggagtctgtcagcgtggacttgccatggtccacgtgggcgatgacagacatgttgcggatgttggccttcttgtccatgatggcgcggatctggtctaccgtgaagttcacctgggcaagacaaggaggctcagaccagctcgtgatttccaggaacacagcatggcacggagcgttcagtccaaacgaaccagcatgcccaaggccaggagggggttggtgctggggtgccccaagcccaccgaatcttgccagcctaacaccccttaagagccaccccgcaatctccaaggaaccaccgttaataggtgtcattcatgattgacaacccagaaataaaagtgctcaggaataaaactgagtgtcaacagatttccttgataccaggtacaaatactaaagtctcatttggggccaaacacgtaagggatgaatcctctcctaaagccccctccacgttgtcaccgggccacccaaacttccccgagcaagaagcttcatcataaaatgcaaggtcaccccttggcaaacgggatcagacaaggccacccaccccaggaaataacggggagccggaacggccctaactgccacaagcctacacctcgtgtctcaataagagtctttgtacatctgggagtcataggaaggacaagtgcctaaggtcgacgattaacagcatcaggagaaggtatttggaaggaaaaggggagcctttcaggtgtcgctttgctcgttctgccattccctgccgcccctagtcccccggcagaaaatcgatctcaaactcgcggcccgcgggttacataaggcgcctccctgtctccccgcttccaccgcggtgcccgccattactacgcctgccacatcatcattccccacccccatccccgctaacaacccagctccaaccaggtctgggcaaggttatggcgccctcggaaacggagaaagggctcggtgaacagcgcggcgcacagacatggcggcggccgcttccccagccccgggtcctccggccccgccgccgctacgtctcctcctggcacggggggccccagcgtcccaggctaggcagcgtaggccccgcggaggccccgccgccgctccggggcaccagcgaggcagggttactcaccatggtggcggatggcggtggattctcccaggtagaaccgaaagaagcgagtcgcgccgaggatggcggcgacgacggcggaagagaacgctgacgtcaacactcagctttttataggcggacgccggttgggcgggtcatgtgactgcgctgcgaaggcggggcgaagggacgccgcgcaagcgcacggaggcgtgtccccccgcccgttaacccattcggcgccggcgcggcgctctagaatagaagctgggcatctcgggggcggtggtcgccctcggtgtgcagtgttcaggtgcacaaagtaaagagcgccgttttagctgagaacgagaaccatagcaacgatattagcttacaagttgtccagtacttctattaaaaccaatttacaaggtgaatagagtctgtggattatacccaagtcaatttccctgtttggacattgttacgtaagacgatacccctgggagaagccgagggaaaaaggacactcgcgaccactatactgtttttgcaactccttacctgtaattatttctaaataaaaactttataagaagcaggcatcggaatcactgatcccacaaatgcatactgagcatctatacaccaggcattgttaggggttttgtagatatagcagtggaccaaacaccttgctagcttgaccacactgcgtgttcttctaccagctactaggatttctctgtgcctcaatttcacctgctcggaggtgatcaataccaccctattgtttgggggagagtgaaacgaactaaagacatctaaaagaattaggaccgtgcctgatacccaacgctcaataaacgctatctattttaattagctaagattgctattaataaaacagttatttatttcaggactggtttgccatgtcccaggcacccggctaagcggtttactggcacaatttcattttctatttcatttcctctccagggggaggcgcaggaagactgtttagcatttgtgtcctaatctgaccctaagaaacagttgaatgtatttcatatctcatgaattggcattcaattgtgtaactctatcccttatgaaaagcccaacccgctgtttagcacatagtaggtactcagcatttcttgcatgaatgatgttctcacagtgcaaatgaaccccctgcggtacatctttccttaaactcactttgtgaaacaggagagccactgcagtgcttttcctgggctgggagagggggaggtgtggatccacaaaaagcaatgcaaattccagcctggactctaaaataaacctgtacactcctccccctcacgaatgcttcgggcactttgctttacaaagcgctgtctcaaccttgggtttcatttaacggatgattgctcttcctatcaccatttaacccagtggaaaactgaaaagtatcttccgaaaggattgaggctctgaaaggcagagggcgcggcagggagcagatgggagcgcccggggtccctaaccacctacacctgtacctgtgacgcgtttagttaagttgcaagtcaagcgcatgcgccatttggggcatgagtttttagcagaggggtagtcagtttcgcattattaataataaaattcttcaaaatttttaaatgcactgagcacctgctacgtgttgcgtttcctattgggggcttcgcagccgttttttccgtgcaaagtgggagcatttcagagatgtaatggaaaggttttcattaaaagaggtgtcaggcgagaggcggaggttgcagttagccgagatcgcgccactgctctccagcctggcgacagagcgagattccgtctcaaaaaaatttttaaaaattttaaaaattaaagaggggttaggctgcttgcggtggatcacgcctgtaatcccagcactttgggaggccgaggcaggcaaatcacctgaagtcaggagttcgagaccagcctacccaatatggagaaaccccgtctttactaaaaataaaaaaattagcccggcgtggtagtgaacgcctgaaatcccagctactttggaggctgaggcaggagaaccgcttgaacccgagaggcagaggttgcagtgagccgagatcacggcactgcatgcactccagcctgtgcgactgagagtaagactctgtctcaaaaaaaaaaaaaaaaaaaaaggagggggggctgttcacaggtatcccggaacttaataaaagaggggttgaatttcttctcaagtgcatgggttgcttattgaaaaattctaacatcatgtaatttaaagaactagggggagagcttaagggaaaaaggggaattttcaaccccataactgcagggatggagccaggtgttggcagggaaggatctctcccactgtcatccccacatccatgaagagcagaatcctggagtaccacaagcagccacaaccaggtcagctgtaataagtacaataataaatatacgctgggtcttttagggtggggaccaataaaaaaattcacctctgcagagaagctccgctgcgcatgcgcctgctgcggcgccaggagagctcagagaccgcagtagcggcccctgctgaccgacagtcgccagtgcaggcctctcgacactgcctttttttttttttttttttttttttttaagaccaagtctcgctctgttgccacgctggagtgcagtggtgcggtctcagctcactgcagcctccgccacccgattcaagcgattcacctgcctcagcctcccgattagctgggattacaggcgcctgccaccacacccgggtaatttttttgtgtttttagtagagacaggggtttcaccatgttggccgggctggtcttgaacccctgacctcgtgatctgcccgccttggcctcctaaagcgctgggattacaggcgtgagccaccgcgcccggccaacactgtcttttaacagtttattgagcgtttactaggacctgacctcacggtcctttaaatcaaatacttcagctaacctacccacaccctgggcttcgggtggcctcctttacgcctgagaaaatggagactcagataagttaagtcatttgcccacgttcacagagctagtaaaggtgcagccaaatccgactcaagtagtggtttaatcgggaaggagcccggtcctgcaaccgttgtctagatgcatttcagatttgggaaaacgggccgggcacggtggtttatgcctgtaatcccagcactttgggaggcagaggcaggcggatcatgagctcaggagattgagaccatcctggccaacatggcgaaaccttgtctctactaaaaatacaaaaaaattagctgggtgtggtggcacgtgcctgtaatcccagctactcgggaggctgaggcacgagaatcgcttgaacctaggaggtggaggttgcagcgagctgagattgtgccactgcactccagcctgggtgacagagagagactccgtctcaaaaaaaaaaaaaaaaaaaaaggccgggcgcggtgggtcacgcctgtaatcccagcactttgggaggccgaggcgggcagatcatggggtcaggagatcaagaccatcctggctaacatggtgaaaccccgtctctactaaaaatacaaaaaattaaccgggcatggtggcaggcgcctgtagtcccagctactcgggaggctgaggcaggagaatggcgtgaacctgggaggcggagcttgcagtgagccgagatcgcgccactgcactccagcctgggcgacagagcgagactccatctcaaaaaaaaaaaaaaaaaacaaaaaacgtggtggctcacgcctgtaatcccagcactatgggaggccaaggcgggcagatcatgaggtcaggagttcgagaccagcctggccaatatgatgaaaccccatctctactaaaaatacaaaaattagctgggcatggtggcagacacctgtagttccagctactcgagagactgaggcaggagaattgctggaacccgggaggtggaggttgcagtgagctgagatggcaccattgcactctagcctgggcaacagaccaagactctgtctcaaaaaaaaaaaaaaaaaaagtggattttgtcttttagatgattaaacaaatgggttcagggaggcctggtgagtctgtgtagtaagaacaggcgcaatggctcacgcctgtagtcccagcactttgggaggcggaggtgcgtgaatcacttgaggtcaggagttggagaccagcctggccaacatgacgaaaccccatctctactaaaaatacaaaaattagccgggcatggtggcaggcgcctgtggccccagctactcaagaggctgaggcaggagaattgcttgaactcaggaggccgaggttccagtgggcagagatcacgacactgcactccagcctgggtgatagtgggagactccacaccctgaaaagaaagaaaaaaggccgggcgcagtggctcatgcctgtaatctcagcactttgggagaccgaggagggcggatcacaatgtcaggagttaagacaacagcctggccagcatggtgaagccccgtctctactaaaaatacacaaattagctgggcatggtggcgcgcctgtagtcccagctactcgggaggctaaggtaggagaatcgcttgtccccgggaggcagaggttgcaatgcgcctagatcgcgccactgcactccaacctggacgacagagcgagactccatctcaaaaaaaaaaaaaaaagaaaaagaagataattgaaacaattaccctcccaggtagaaagtccctgctgatggggtgcatctgttcagcagcggtgttgagagctcaagctctttttaacgctttgccttgctgtctccaaagtattgccttcatcctcatagttcaaagtgtccaccatcacattcacgtttcagccaataggaagaaggaaagagaaaaacaggaaaagagtttacatgccactcctgctattggtcagaatgtgtcacgtgaccatactcagctgcaagggttggtgggaaatgtagtctttttttctgggaggccatgtgttcggcttaaaattgtctttttttctttttctttatttcttttttcttttctttcttttttttagacggagttttgctcttgttgcccaggctggagtacagtgacgcgatctaggctcactgcaacctccgactcccgggttcaagcgattctcctgcctcagcctcctgagtagctgggattacaggcgcacaccaccacgcccagctaattttttgtatttttagtagagacggggtttcatcattttagccaggctggtatcgaactcctgacctcagatgatccacctgcctcggcctcccaaagttcagggattaccagcgtgagccaccacgcccagcctttttctttccttccttccttccctccttccctccttccttccttccttccttctcttcctttcttccttcgttccatccttccttcctttttttgttccttctctcctttcttccttcttttttttctttccttacttgttgtttcttttttcttttcttttttgtttttctgagacagagtcttgctgtgttgcccaagctgcagggtgcagtggtgcattcatagctcattctagtcttgaactcctgcgttcaagcaatccttctgtttcagcctccatattggcaggcacgcaccaccacatccaggtaatttttaaatttttttagagttagaatctcactatgtccccgaggctggttttgagctcctaacctccaggaaccctcctgcctctatcgatttcttttattttattttttgtagagacagggtcttgctgtgttgcccaagctggtcttgaactcctgggtccaagggatcctcctacttcagcttcccaaggtgccggatgacaggcatgaaccattacactcagccagtttttttgttttccttttcacaaagcaccaaagaagaagcacagttgtgttgtttgttgtttttttgtttgtttgggggtttttgggtttttttgagatggggttttgctcttgctgcccaggctggggtgcaatggcgcgatctcggctcaccacaacttcttcctgggttcaagcgattctcctgcctcagcctcccaagtagctgagattaccacgcccggctaattttgtattttttgtagaaacggggtttttccatgttgatcaggctggtctcaaactccggacctcaggtgatccacccgccttggcctccctaagtgctgggaatacaggcgtgagccaatgcacccggtctaatttttgtatttttagtagagacggggtttcaccatgttggccaggatggtctcaatctcttgaccttgtgattcgcctgccttggcctcccaaagtgctgggattacaggcgtgagccactgcgcccggcctttttttttttttttaattgagatagcgcaatctcagctcactgcaacctccctttcccaggctcaagcaattctcctgcctcagcctgttgagtagctggaattacaggtggccgccaccacgcctggctaatttttgtatttttagtagagatgtggtttcgccatgtcagccaggctggcctcgaactcctgacttcaggagatgggcccaccttggcctcccaatgtgttgggattacagatgtcagccaccatacccagccttttttttttttttttttttttgagatgaagtctcactcttgtaccccaggctggggtgtaatggcatgatctcggctcactgcaacctctgtctcccagaatcaaatgattctcctgcctcagcctcccgagtagctgggattacaggcgcctgccaccacacccagctaatttttgtatttttagtaaggacagggttttatcatgttggccaggctagtctcgaactcctaacctcaggtgatccgcctgcctcggcctcccaaagtgctgggattacaggcgtaagccaccgcacctggcctgttttcatttttaaactttttttcttctttcaacttattttaagatctggggtacatgtgcaggatgtgcaggtttgtcatacaggtaaatgtgtgccatgattgtttgctgcacagatcaacccatcacctaggtattaagccccacatcccttaactattcatcctgatgctctccccgccccccacccccacgtcctaaatttttttttttttttttttttgagaaggagtcttgctctgtcgcccaggctggagtgcagtggcgccatctcagctcactgcaagctccgcctcctgggttcacgccattctcctccctcagcctcccgagcagctgggacgacaggcgcccaccaccacacctggctaattttttatatttttagtagagacggggtttcaccgtgttagccaggatggtctcgatctcctgacctcttgatccacccactttggtctcccaaagtgctgggattacaggcaggagccaccgcgcccggccaattttttattttttgtagagacagggcctccctacgttgcccgggttagtcttaaactcctggacttaagcaatcctccagccttagctgcccaaagtaagggtatacaggtgtgagccactgggcctggccaacatttcttattctgaaataattatagattcaaagggagctgcacatataggacaaacaggtcctacgtgcctgtcaccaagcttccctcagtggtcacatcttatgtacaacatccgaacaagaaatatgacattagtacaatgtgtgtatacatttccaagttattgtagctggacactgtggctcatacctggaacccagcactttgggaggccaaggaaggaggatcccttaaaaccaggagtttgagaccagcctgggcaacatactgagaccctatctctaaaaaaaaaaaaaaaaattagctgggggtggtggcacatgcctgcagtctcacctcctagggaggcttgagcccaggaggtcagggctgcaatgagctatgatcatgtcactgcactccagcctgggcgacagaatgtgactctgtgaaaacaaaaacaaaggctgggcgcagtggctcacgcctgtagtcccagcactttgggaggctgaggcgggtggatcacctgaggtcaggagtttgagaccagcctggccaacatggtgaaaccctgtctctactaaaaatacaaaaattggccacgcgtggtggtgagcacccgtaatcccagctacacgggaggctgaggcaggagaatcgcttgaacccgggaggcggaagttgcagtgagccgagatcacgccactgcactccagcctgggcaaccagagcaaaagtttgtctcaaaacgtatgtataaataaataaaacaaaaacatacagaactatttcatcaccacaaagatcactcttctgttacctccctattgtcacaactattcccctccccatggccctgccctgatccctggaaacaactgacctgtgttccagctctataattctgtcatttcaataacctttttgttgttgttcttgttgtcattgtttcgagacggagtctcactctgtcgcccagctggagtgcagtggtgcaatctcaactcactgcaacgtctgcctcccgggttcaagtgattctcctgcctcagcctcccgagtaactgaaattacagatacccgccaccacatccagctaatttttgtatatttagtagagacaggctttcatcatgttggccaggctagttttgaactcctagcctcgagtgatccacccgccttggcctcccaaagtgctgagattacaggcgtgagccacagtgcccagcccagattggcttttgccccccactcagcagaatgcccttgagaccctcttgtcctttctaaattaatggcaatataataatatttcacaattcctgagggcttactgtgtaccagacactgagctaaatgctttatggccctacaatcaccctgtaaaatagatacaatttgtggtgcccagcctgcacgattgtcccaacgaatctgccctcctgacatccgggtatgacctgctcacattgaacagggctgagctttataggatgttttgaaaatgggagcgtgcaggccgggcgcggtggctcacgcctgtaatcccagcactttgggaggccgaggcgggcggatcacgaggtcaggagatcgagaccatcccggctaaaacggtgaaaccccgtctctactaaaaatacaaaaaattagccgggcgtagtggcaggcgcctgtagtcccagctacttgggaggctgaggcaggagaatggcgtgaacccgggaggcggagcttgcagtgagccgagatcccgccactgcactccagcctgggcgacagagcgagactccgtctcaaaaaaaaaaaaaaaaaaaaaaaaaaaaagaaaatgggagcgtgctgtttcaggttaggctatacaagacatcgtggcaggtcccagtagctcacatcgtaatcccagccttttggaaaaggggaggattgctcgaggctagcagttcaagaccagatttggcaacatagggagaccccgtatctaccaaaaaatcttttttttttttttttgagacagtgtctcactctgcagccaggctggagtgcagtggcacaatctcggctcactgcaacctctgcctcccaggttcaagtgattctcttgcctcagcctcccgagtagctgggactactggtgaccagaaccatgcccagctatttttttttgtatttttagtagagatggggtttcgccatgttggccaggatggtctcgatgtcttgacctcgtgatccacccgcctcagcctcccaaagtggtgggattacaggcgtgagccaccgcgcctggccctccagaaaccttttttaataagctgggcatgatggtgcacccgtgtagtctcaactacttgggatgctgaggcaggagggtcacctgagcccaggacttttttgtttttttttttttgagacggagtctcgctgtcgccaggctggagtgcagtggcacaatctcagctgactgcaaccctccaccttctgggttaaagcaattctcctcatctctacaaaaactgcaaaaaaattagctgggcatggtggcgtgtggctataaaaccagctactcaggaggctgaggtgggaggattgcttgagcctaggaggcggaggttgcagagagccaagatattgccactgcactccagcctgggtgatagagtgagactcagtctcaaaaagaaaaaaaaatagtaggcgggtggttattcctatgaaagagacttctgtgtccctgagaaaatgccctgagggtggggtggtgggagagagaacaaattccttaactcccaattcaattatttacttatttatctttagacagcatctcactgttacgcaggctggagtgcactggtgtgatcatagctcactgcagcctcgacctcccaggctcaagcagttctctcacctcagcctcccgattagctgggactacaagttcacgccaccatacctgggttttttgttgtttttttttaaattgagatggagtctcgctctgtcgcccaggctggagtgcagtggcgccatctcggctcactgcaagctccgcctcccgggttcacaccattctcctgccacagcctccccagcatctgggactacaggcgcatgccacgacacccggctaatttttctgtatttttagtagagacagggtttcaccgtgttagccaggatggtctcaatctcctgaccttgtgatctgcccgcctcggcctcccaaagtgctgggattacaggtgtgagtcaccacgcccggccatacctgggtatttttaagattgttgaagagatggggtctatgttgcccaggctggtcttgaactcctgagctcaagcaatcctcctgcctcagcctcccaaagtgctgggattctaggcctaagccccggcgcccaacctgtcccccaattagattatatttgtttatacaatctgttttatttatttatttacttatttattttatttttttgagatggagtctcgcgtgttgcccaggctggagtgcagcagcatgatctcagctcactgcaacctctgcctctcgggttaaagcgattctcctgtctcagcctcctgagtagctggaattacaggtgtgtgccactatgcccggctaatttttgtatttttagtggagacaggggtttcaccatgttgcgtgggctggtctcaaacttctgacctcaggtgatcctcctgcctcggcctcccaaaatgctgggattacaggagtgagccactgtgcctggcctacaatctgttttagagccagaaaatgcaatcaattgtgataatacattgctatgttttgaaatacatatatacaaacgtgcacacaactttatttaaatttaagatgcttttaatattcagctaacaccaaattcacaatttgatactttttttttttggtaaagatggagtctccttctgtcaccgaggctggagtgcagtgtcctcatctcggctcactgcaacctctgtctcccaggttcaagagattctcctgcctcagcatcctgagtagctgggattacaggtgcgtgccaccacgccccagtaattttttttgtatttctagtagagacagggtttcaccatgttggccaggctggtctcaaactcctgacctcatgatccacccgcctcggcctcctaaagtgctgggattacaagcttgagctaccgcgcccagctcataggtatttttgcccaggaaacaactccatttacttaagtgcaaaacgggagtaactatctgtatctatatctacctctctccatctatctctatgtatcttacataacagtggaggtggtttgtgaattttgtcagaattgcaaaggatctgatttagaactgatgaattctgtcctaaaacaggctgtaaagctttaaattggtcgtgtggggattttccatagcctccctctcctctttcttgtctgtctacctcccatcagtgtctgaacatgttctgtatttagcctttttttttttttttgagatggagtctccctctgttgcccaggctggagtacagtggtgccatctcggctcactgcaagctccaccttccgggttcaagtgactctcctgcctcagcctcccaagtagctgggactacaggcgtgtgccaccacgcccagctaaatttttatttttggtagagatgggttttcaccatcttggccaggctggtctcgaactctgggcctcaggtgatccgcccatgtcagcctcccaaagtgctgggattacaggcgtgacccaccacgccgggacctttaattagcttttgattttgtttgttgttgatctccctcctggaatgccagttccacgaggacagggaattttgcctgttgtggtcaccactgtgtctgagcatctctaacaaagactagcaagctacagccctcagccctaatctttttttttttttttttttgagtctcgctctgtaaccaggctggagttcagtggcacaatctcggctcactgcaagctccgcctcccgggttcacgccgttttcctgcctcagcctcccgagtagctgggactacaggcgcccgccaccatgcccggctaattttttgtatttttagtagagacggggtttcaccgtgttagccaggatggtctcgatctcctgatctcgtgatctgcccgcctcggcctcccaaagtgctgggattacaggcatgagccactgcgcccagcgtattattattattattattattattattacttttgagacagagtctctctctgtcacccaggctggagtgcagtgacacaatcacggttcactgctgcctggaactcctgggctcaagccatccacctgagtaggtaagactgtaggcgtgcaccaccatgcctacttaattttttattttttgcagagagaggatctcattatgttgctcagtctggtgtagaaatcctgtgttcaagcagtcctcctgcctggatctccaaaagttctgggattacacacccgacccacagcacccggccttctttctcttttaaatgttcaaacaaaagcataataataacatgacatgtgaaaatacgtaagattgaaatttctgtgtttatgaagttctactagcatacaggcctggctcagtggttcacacccgtaatcccagcattttgggaggtccaggagggcagatcactcgaggtcaggagttcaagaccagcctggccgggggcagcccccgcccggccagctgccccgtccggaagggaggtggggggcagcccccgcccggccagccgccccgtccgagaggtggggggcgtctctgcccggccgccccgtctgggaagtgaggagcccctctgcccggccgccaccccgtctgggaggtgtacccagcagctcattgagagcagaccatgatgacgatggcggttttgtcgaatagaaaaagggggaaatgtggggaaaagaaagagaggtcagattgttacgctgtctgtgtggaaagaagtggacataggagactccattttgttctgtactgagaaaaattcttctgccttgggatgctgttaatctataaccttacccccaaccccgtgctgaaacatgtgctgtgtccactcagggttaaatggattaagggcggtgcaagatgtgctttgttaaacagatgctagaaggcagcatgctcgttaagagtcatcaccactccctaatctcaagtacccagggacataaacactgcggaaggccgcagggtccgctgcctaggaaaaccagagacccttgttcacatgtttatctgctgaccttccctccactagtgtcctatgaccctgccaaatccccctctccgagaaacacccaagaatgatcaatgaatactaaaaaaaaaaaaaaaaaaagaccagcctggccaacatggtgaaaccccgtctctgctaaaaatacaaaaattagctgggcctggtggcgtgcgcctgtagactcagctactcaggaggctgaggcaggaaaatcttttttacctgggaggcggaggttgcagtgcaccgagatcaggcccctgcactccagcttgggcaacagagcaagactttgtcataaataaataaataaaataaaataaagttttactagcacacagccatgctcatttgtttttcttttttcttttcttttcttttttgagacggagcctcgttctgtcggccaggctggagtgcagtggtgtgatctcggctcaccacaacctccgcctcccggttcaggcgattctcctgcctcagcctcccaagtagctgggactataggtgtgcaccaccacgccctgctaattttcgtatttttagtagagatggggtttcaccatattggccaggctggtctcaaactcctgacctcatggtccgcctgcctcggcctctcaaagtgctgggattacaggcgtgagccaccgctcccggccagccatgctgatttgtttatttatagtctacggtttcttttgcccttagatggcagagttgagtaattgctctagacattatatgtggtccaaaagcagaaaatagttatttcctggatctctacagaaaacgtttgcagatccctgaaccaaaacagtgccttgtatacagtaggtgcttgataatacagaaagattattgtttgcatgtctttttaattttttatttttgagacaaggtcttgctctgttgccctggctggagtgcagtgccactatcacaactcactgcagcctcgacctcctgggctcaagcaatcctcctgccttggcctcccaaagtgctgagattatgagcgttaagctactgtgcctggtcattacttgtatatctgatgtaagaaggggaggtgttttagcctttggagacagctggatgcagattaagacagtggtttaggctgggcatggcagctcaagcccgtaatctcagcagtttgggaggtcaatgtaggaagatggtttgaggccaggagtttgagaccagcctaggcagcagagtaaaactccccctcccaaatctacaaacaaacaaacaaaaaaacaaaacaaaacaaaaaaaggccagatgtggtggctcatgcctataatctcaacattttgggaggccaaggcaggtagatcacttgaggtcaagagttcgagaccagcctggccaacatggcaaaaccccgtctctattagaaatacaaaaattagctgggtgtgttggcacgaacctctaatcccagctactcaggaggctgaggcaggagaacagcttgaacccaggaggcggaggttgcagtcagccaagattgcacccagcctgggtgacggagtgagactctgaatccaaaaaaaaaaaaaaaaaaaaaaaaaaaagatagtggcttagccaatgcctgggcaggtgttcccatctgatactggctttcatcatcacagaatgggggctgatacagacgcagctaacatggaaacaccttattctgacagtttctaggacagggctcagcaatttttttgttgttgttgagatggagtcttgctctgttgcccaggctggagtgcagtggtgcgatctcagctcactataacctctgccttcagggttcaagcaattctcccgcctcagcctcctgagtagctgggattacaggtgcccaccatcacacccagctaatttttgtatttttagtagagacggggtttcaccatgttggccaggctggtctcaaactcctggcctctagcaatccgcctgcctcagcctcccaaagtgctgggattacaggtatgagccactgcaccaggccacggctcagcaattttaggtagagagcatcctgagtccctcctgatccacccttcaggttcaacaattggcaacacatatattccattttgttttatttttctccctcaatactctccccattatttcttttctttttttttttttgagacagagtttcgctcttgttgcccaggctagagtgcaatctcggctcaccacaacctctgcctcccgggttcaagcgattctcctgcctctgcctcccgagtagctgggattacaggcatgtgccactacgcccagctaattttgtatttttagtagagacagggtttctccacgttggtcaggctggtctcaaactcctgacttcaggtgattcgcccgtctcgggctcccaaagtgctgggattacaggcgtgagccacagtggccagcctcttcctgttatttcaatgcaaatcctataccatttcttctgtaaatatgcttggcagttatttgtaactgataaggactcttcattgatttattataattattttagagacagggtctagctatcactcaggccagagtacagtggtgctatcatagctcactgcagcctcaaagtcctgggctccagtgatcctcctgcctcagtctctggagtaggtggcactaaaggtatgtgcctccatggccagctaatttaagaaaaaatttggggtcaggcgcggtggctcacgcctgtaatcccagcactttgggaggccgaggcgggcggatcacgaggtcaggagatcaagaccatcctggctaacacagtgaaaccccttctctactaaaaatataaaaaattagccaggcgtgctggcaggtgcctgtagtcccagctactcaggtggctgaggcaggagaatggcgtgaaccctggaagtggagcttgcagtgagccgagatcgtgccacccagcctgggcaacagggcaagactctctcaaaaaaaaaaaaaaatggggggggagctgggcgcagtggctcacacctgtaatcccagcactttgggaggccgaggaaggcagatcacctgaggtccagagttggagaccagcctggccaacatggtgaaaccccgtttctgctaaaaatacaaaaattagccgggtgtggtagcacgcggctgtagtctcagttagttgggaggctgaggcagaagaattgctggaaccaaggagacggaggttgcagtgagccgagatcacgccattgcactgcagcctgggtgacagagccagactccatctcaaaaaaataataataatttttttgtagagatggggatctcgtgttattttgccctggctggtctcaaactcttgggcttaagcaatcctcctgcctcagcctcctaaagggctgggattataggcttgaagcaggcacccagcccaaaacatattttaaaacacagacacagtaccatgattacacagaaccttcaaaccacaagggttgcaggaatctacaagtgagacaaaatttctctcaactgccaagcacgctgtctcatgcctgtaatctcagcacttttgggagattgaggcaggtggatcatttaaggtcaggagttcaagaccagcctgggcaacatggcgacaccccgtctctactaaaaataccaaaattagctgagtgtggtggcgcccgcctgtaatcgcagctactcaggaggctgaggcacgagaattgcttgaacctgggaagcggaggttgtagtgagctgagatcgcgccactgcactccaaactcggcaatagagactctgtctcaaaaaataataataataaataatagaaccaaacacacacagaggaaggtacatgtaaaaacgggtgcaatcgaaataatgtctgcactcgagttgattccattatactaacatcaacgcccaggttttgacaacataacatggctatgtaaaactttttttgaatcttttttttttttttttttttgagatggagtctcgctctgtcacccaggctggagtgcaatggcgcaatctcagttaactgcaacctccgcctcctgggttcaagctttttgtttgtttgtttgttttacatggagcgttgctcttgttgtctgggctggagtgtgatggcacaatctcggctcattgcaacctctgtctcctggggtcaagcgattctcctgcctcagcctcctgagtagctgagcttacaggctcccgccaccatgcccagctaatttttgtatttttagtagagacaggagtttcaccatgttggccaggctggtctcaaactcctgacctcagttgacccgcccgccttggcctcccaaagtgcagggattacaggtgtgagccatggagcccagccagttataaaaatactatcactggggaaagctgggagaaaggtgcacaaatctctctgtactatttttgcaacttcttgtgaatctgaatcttcaccaaaacaaatacaaattatacttaaaaacaaaacctggccaggtgtggtggctcacacctgtaatcccagcactttgggaggctgaggctggcagatcccttaaggtcaggagttcgagaccagcctggccaacacggtcaaacctcgtctctactaaaaataccaaaaattagccggtgtgatgatgtgcacctgtagtccccactgcccgggaggctgaggcaggagaatcacttgatcctgataggtggaggttgaagtgagccaagatcccaccactgcactccagcctgagtgacagagagagaccctgtctcaagaaaattaataaattaaataaaattacaaaaatgagccaggtatggtggcacacacctgtaatcccagctattcgggaggctgaagcacaagaatcagttgaacctgagaggccgaggttgcggtgagtcgagattggcaccaccacactccagcctgggtgacagagcaagaccctgtctaaaacaaaacaaaacaaaacaaaaacaaaaaaacccaatcccccgcagaatcagcagggccggaatgaaggtaagactcatacgtgcaatggcagagctggggttttgctgtcaatggacaacatttcaacaaatctaaggaccttaaccggcttcattgcaatttgctacacttcattccataaaataggataactgttccaatcagttgggcagaggaggttggctctacaggaagagaggggttgtagagagcaaaatcaaagaacaggctgggcggggtggctcatgtctgtaatcccagcactttgggaggatccccgaactcggaagtttgagagcagcctgggcaacttggcaaaaccccatctcgacaaaaaatacaagaattagccaggcgtggtggtgtgcacctgtagtcccagctactcaggaggctgaggtgggaagatcacctgagcccgggcggttgaggctgtagtgagccatgactgagccactgcacaacaacctgggagacagaaacctatctcaaaaccaacagcaacaacaacaacaaaaacccaacagcaaagaatgtgttaactcattagtgttaccatcaggttgtttcaggctagtttttttttttttttttttttttgagacggagtctccctctgtcgcctaggctggagtgcagtggcgcgatctcggctcactgcaagctccgacttccgtgttcatgccattctcctgcctcagcctcccaagtagctgggactagaggcgcccgccaccaagcccggctaattttttgtatttttagtagagacggggtttcaccgtgttagccagggtggtctcgatctcctgacctcgtgatccacccgccctggcctcccaaagtgctgggattacaggcgtgagccaccacacccggccaggctagtttttttgtgtaaggattaaagaaattaagcagagggaattttaggacattggccactgaaggctgaaactggcctgtttggaaaattggttggccggatcatctaaggtcagtagttctcgactagtctggccaacatggcgaaaccccgtctctactaaaaatacaaaaaaattagccgggtgtggtggcgggcacctgtaattccagctactcaggaggctgaggcaggagaatcgcttgaacctggaaggcagaggttgcagtgagccgagattgcgccattgcattccagcctaggcgacaaatgtgagactcctcctggaaagaaagggagagagagagagagagagagagagaaagaaagagagaaaataaaataaaagagaaaatgggctgatagggctccctcctggttttcccaaaggtcagataacaacttagcttcgtcattgtgacttagaatctgagtgtgactagctgcattttgtttattcctgtgtcttggtgcctagcacaagagtttagtctaaaacaaccgcctcctataattttgtcgcccaggctggagtgtagtggcatgatcaaagctcactgcagcctccaactcctgggctcaagcgatcctcctgcctcagcctcctaagtagctgggaccacaggcgcacactcctacgtctggctctttacttaaaattttggtatttcaggccgggtgcggtggctaacacccatgatcccagcactttgcgaggccgaggccggtggatcacctgaggtcaggagttcatagaccaacctgaccaacacagtgaaactccatctctactaaaaatacaaaaatcagctgagcgtggtggtgcccacctgtagtcccagctactcgggaggctgaggcaggagaatcacttgaacccgggaggcagaggatgcactgagccgaaattgcgccactgcactccagcctggcgccactgcactccagcctggtgacaaagcaagactccgtctaaaaaaaaaaaaattagctgggtatggtggtgcatacctgtaatcccagctactcgggaggctgaggcaggggaatcgcttgaacccaggaggcagaggttgcagtgagtggagatcgctccattgcactccagcctgggcaacacagcaaggctctcaaaaaaaaaaaaaaaaaaggctgggcatgatggctcatgcctgtaatcctagtactttgggaggttgaagcgggcagatcacttgaggtcaggggttgcagaaaagcctggccaaaaaaaaaattagctgggcgtggtggcagtcgcctgtaatcccacctacttgggaggctgaggcaggagaatcccttgaacccgggagatggaggttgcagtgagctgagatcgcgccattgcactccagcctgggcaacaagagtaaaactccgtctcgaaaataaataaataaataacaatttggtatttcatccatcatggactcttttgcactgatttttttatgtttaaagtgttggactagccaggtgtggtgactcgcgcctgtaatcccagcactgtgggaggcccagacagaaggatcatttaagcccagacattcgagaccaccctggataacataatgagatcctcgtctctacaaaaataaaaataaaaaataaattgcactaaaatacttgattattgaagtttgaaatccacttctacgggcacgaagccacttagctccaaagccaaggagcgctttggagaagaggtcccaactggtgcagatccaaggtttcccatgggtggggaggcaggatggggggggcgcctgcaaagaggtgagggctgtacgatctccaaggaatttgggagcaggggtcccgcttttctccgccgggcgcccccagccagctggttgccgagcccacgccccatctgcacaccaggacccggatgtgcagcgcgcggggtgtctgggcccgtggagcctgcaccgcgctgcgctgcaaggcgcctcactgtacgcactggcggccgttgcggcggagcaaccatcccctgcccgacgccgccgggagtctggagacgcacctggcggccgccgcgcgcaggaagccacggcacctagctgcattgttgtcgctgccaccgccccctctcgccttccctccctagaggaaaccgagcacccgtccccacctgcgcagggctagtaccactttaaggagtcaggcgccgccggggtaggcgtggtcgccgcgagcgggggggggggcgctggtgtaggacggacctgattggccggaggcccgggcggtggccgcgcgcgcctgcgcaggaggcagcagcgcgcaccggcggcgggaggagcgcgcgcgggtgctaattggcccgggcggcggccccgcccgcgagtggtgagcggtcacgtgacgcgacggctgggggctcccggcgcgggggacgctggtgaccaagatggcggcggagctggtggaggccaaagtgagtgagcggtggcggcgccggccggggcaagtgggcgagagggcgggggccgggccgcaggtcgaggtctgcgccttctgtccggggccccacagcgcggccggcccgcggctcgccgtcccggcccccagaccccgacccccggtctcagggtgagggcggggggcggggaggccgggggcggggccctcctgcctcacccaggtcttcgcgccgggggtcgctcccccggcttcaggcagggtccccccacccagcccgagcccttagggtcccggtccctgagcgccaggccagggccgcgcctcccggttgaggcaccgtcccgccgggatgcgggacgtgttgagctactcgttgccctcttggttccgagccggggtccttgctttttggctggtgtgttggggggagtgtctgcgcctccccgcccacagggctcccaggactgctatctgggtctcgtccccgcccaacaggccaggctggggtttgcgagtctcctgctcggaagggtcccccgagtcctggatagtgtcctgccaccgtccaggtggaggagtcagggccctgagaccacccccaagacacggcacgtcctcttggggtctggagttcaggctcggtcttgagcccctcttcagctcctgcattggtcccagaaccccgcccccttcccgacaccgtctctcacacgccggagtgggcgcttgggggaaggctgggccctccctttccctccccataggatggagttcggaccactcttcttggtcacagaccttctttattctcctttttttaatcttaaatcctggactgtgctttggtcctacctcgttcctctcgggacagaatctgaggctactgattctgcttcagggggctctaaacctcacctgtgcagcatcagatactgtcctcaaaccttggctgcttctcctattttctgctcttgagcgagtctacttcttaggtcagacacccaccctccccctacacagcccccagaacttttatgcaccccaactttggtttctaaggtcccctctctttctgcctattctcttttgttgatctctggagggtccccactgggtccaaggctggcctctttagaacaactgttgctgctgctctattatactttgggtcctgtccaggtcccatgtcccatagataccatctcctagcttggaaccacttttaatcatcctgggattgagctcagagtatccccattccaggggatgtaccttcttgtaggtgcctacctagagctgagggtctaaaacccttagaagtgcccgcaaggccacggcttccggggaggttaggggacctctccctcccccatcccctttcacatcttccctccccacggtcctgacctgtacgtatcttcttctcggtcctctcacattaccccctgggatctgaaaacacagcactcagggctctgtgattatagcatatacctctcttcgcctcccaaccctacacccctgcgcacacttctgctcctctctagagttttgaaaagtggagactcgccctggagatgtggaggcctgaactctgtaaacccaaagtggcaggctctgggcttgaagtgtcctggagtcctgaaatgtaacctcccgtttcggggcttggagctgtgaccctggaccccaacccccaccctggctgagggcagggtctgcactcttttgtaccatccaggccttgaaatatgatctgatgaactttccttaaccctctggtggctgggcccccccccaccccaattaaatcaagttgacccttctttcaggttctctaaaccgtgagcctccattcaagggggcctggaccctggggaaccttctttctccttgagtctgttgctacctctccaagtaccttaaatgtcattgaaacatccccttctttacaggggccttccccagcctgtcatattcatggctgcagattctgtcttttggggtgcatcacagactgctcggaggggcgaatgttgggggtttgttggtgaactttgaaatctgagactctcagcttgaggcctgcaggcgggtttggggcaggggtgtctgtgagctccctgaaatagtccacagcgtttcgcacagatctccgctttcctggagagaggcgccttcctgagctacccccggtgctctgaggggcctatgctggaggaaaggttcagcgcagctgctgtgtctcggctgatgtctccccatgcgacttccaggcaagcctggagttgaaactctggaagctgccggggcctggcactgtttataaacacagctctgacggcaagcaggtcagcttgaagccagggcaggaagtgatcttggggcatttggggcttcttcctgaatgcttgtcccccccgcactccctccagtgtcaagggcaggctcctccgaggtggcagctgctgggaaatctgagtcgtgaacatatggccacctaaggggtgtgctccgggaagcgggagctgcggctccactgtccagcctgggtggggcaggggctcccggggtgcgaggatgtcagcaggttccccagcccacctgccttcggccagtctgccagtgtgaagtgtccacatgacatcgtctctccctgctaaggctttgggccacttccagaagaaacatcttgtctgcaagcctttttgttttctgcacaaggtaggaagtcaggccaagggagatgaggcatttttgttttcaaagcatccctgactctcaggcccagcagaccatgcaggtccccatagccagtgtgctggtgagtgagggtcccccgggcagcagacgggaacacccttgggaggccagaggccgaggggccgatgccagtcccacgcatgtactagggaggctctgggccagcctcttccctctgtgagcctcggtttcctcacctacacgatgggtgtcctcattgtgaaattagcgacacaggccttgctggtgcctggtagggagcaagacgctggcatcccgattctttacagtcacggggccccgcagccctgatatgggaagaggcttctcccgaggctctttgggcagggctgggccgcctgcacgtgtgtccctgtcattttgagcctggacagcctctccgtctccaacaggaccctggcccgatacagctggaagaaatcagagctgacagatgaggacccgacagtgggccccggctgctgcagctttggtgctgaaatgtgcggctaggctcctggtctcaccctggggcagccaggagccggaaacctcagcgcctcctggcacggaggctgcagtttacataccccactgggactgcctctggcttcgaccctcagggtctttcgagtggagtttgaatggtttattggtttcttcgggtacccgccagctttccttaacacccttgacgcttgagctttctccccattcctcctggaagctactgtttcccaccacatctcattcatcccaggccagcttcagggctaagggtgggtggccctgaaaccctgccagcccatccctcgaggacacctggcttctgcagcctgttgaggagccttccttccccttcagggtcctacccctcatggaggtcaggccactgccagtctaccccacctcaaacaccagggtcagctgggctctgctgtttggtttttatttcgctggagaggcccggccaggcgatgagggccaggtcctgccaagcctcatttgtcgctttgacccaggtcctgcaacagcccctgtggctgctatcttccccttggaccggtcccccagggactcagggcaacgtgtggaggtgtgtttggtgtggaggtgtgtttggtgtggaggtgtggggggtgtggaggtgtgtggggtgtggaggtgtgtggggtgtggaggtgtgtggggtgtggaggtgtgtggggtgtggaggtgtgtggggtgtggaggtgtgtggggtgtggaggtgtgtggggtgtggaggtgtgtggggtgtggaggtgtgtggggtgtggaggtgtgtggggtgtggaggtgtgtttggtgtggagctgtggggtgtggaggtgtggggggtgtggaggtgtgtggggtgtggaggtgtgtggggtgtggaggtgtgtggggtgtggaggtgtgtggggtgtggaggtgtgtggggtgtggaggtgtgtggggtgtggaggtgtgtggggtgtggaggtgtgtggggtgtggaggtgtgtggggtgtggaggtgtgtggggtgtggaggtgtgtttggttgtcgtgagctgtgggtatttagcaccacacagagcccaggatggccccagtgtccacagggccaaggaggagaaaccctgcctgggatgatcagcagatgtttcggaggcccccacaggcccagccctgtgttgacatccagagggtagtgtggcagcaagaaccgcccctggcttcagagccaggcctgggttcgaatcttggcgctgccacctctgagccgacagttcctcatttgtgacagagctcacacaccagcctagcaggggtgttttaaggatcagagttaaatatataatcacatgaccggcttggttcccggcaggtgattagtactaagtaaactgtggctaccgttggcgagaccgaagggaaaacatatctgtggctgacatgggttgagcgcccgcccagccagtgctttatgtcattatcctcccgacgtagagactgagggtcagagaggcatttggtgtttgccggtaaggcactggcagaggctgtttacaagtaaagcacaattgtcagttcctgccctggggatgctttcaggctgaagacagggaaagagaacctaaaatagaagggggggcctagtcagaggcgcttttgctgcgttggcgatgctggggaaagtttgatgaggaggagggagggggcagggctttgctgggagggggcaccgtaggggcagggcactccaccagccccagccaaggctggcgcttcctggcgagtgggtgtctttcacggcccccacatcggggcctggcctccatggagtcccctgcctcgcagctgtgtcctctgagtgtgtgtgtgcttgctcctcctcagaacatggtgatgagttttcgagtctccgaccttcagatgctcctgggtttcgtgggccggagtaagagtggactgaagcacgagctcgtcaccagggccctccagctggtgcagtttgactgtagccctgagctgttcaagaagatcaaggagctgtacgagacccgctacgccaagaagaactcggagcctgccccacagccgcaccggcccctggaccccctgaccatgcactccacctacgaccgggccggcgctgtgcccaggactccgctggcaggccccaatattgactaccccgtgctctacggaaagtacttaaacggactgggacggttgcccgccaagaccctcaagccagaagtccgcctggtgaagctgccgttctttaatatgctggatgagctgctgaagcccaccgaattaggtgagtggtcaccctggggaggctgcgactggaggcttcacctaggccccgtcgcccagcccagcccagccacacagccgacttcgagtgatgttctctgtggcgcagccagggcggggagccacagtggccaggggtgtccttcctcggaagcaaagggaccatctttgatattggtcaccccttgctgtgttacaagttaccccgaaatggagccactggaagcagggggcgtctgttagctctcaggaacctgtgagctgtgttgcggggcattggggcttgggggctctcatgaggctcagtcaggctggagccacctcatctggaggctcgaccagggctggagcaggcacatccttgtgtggtggctggcaggcctcagctcctcgccagctcttggccacagtccccaggtcctcatggtgcggactcctgcacggattgcctgggcgtcctcagcctggtggctccctcaccctagggtagcgagtgtgcacctccaagctgggagctggagccctttttataacccaacctcggacacgcctcgccatctcccccacagagtccgttgctcacacagactctgtggcgcatgcagggaccacaccaggctgtgactgccagggccaggggtgaccagggccacctgggagcctggtttccctgcttattccccttggaaagggggctggccagtggcatccttcccccgggctctggttcctcgctggcagcctgcaggagtgtccttggtcagtgggctcaggtcactgccaggctgtgtgcaccgggcgtgctgggggttcagggcgatcccaggcggaggagaggtgctgggctccacgcttctctctctcgtgtctttgtctgcaagcactgactgagcaggaactgtgtgtcaggacctcatagcccacagcagtgtggacaggcccctggtgcctccccagcagccgtggccattcaggctgcaggtgggcattgagcccagtctctgcctcagccatagccctgagctcagggccagggaggcctccgcagccccagcccccagggcagagagagtgtgcagcctctgggactcccagatagggagcggaacgtcctgggcctttgcggacctgtgccttgaggcgctcagatttcaccaagtcctctgtgtgcctggaggtctctccgtctcttcttcctgcctcccctcccctgcccccactctttccttcgcacagtaaacatcggagcgcctgctgggtgggtgcgtgatgggcaccaggcgtgggcacgcagcagggaacaggaccaaggccacgaggttcagaaccctgtgcatgccccctcccaccctgctgacccagcaacctgcctggcccctgctgtggcctgagggcccttctctggcacgcttcagtccattgggtgccagctggcccccgctcccctgcccagggaggcagcgttgatgggggtagggggaaggggaactggctgcttttcccctcccatctgcagccctgggacttagtgaggttaggctggaggggctgtgcttccaggtgaggatggaggaagtggaggagggaggaaggtgctgtcggtggttcctgcggcagccgaggctcctccctccagcctgaggctccgccttccaagtgaggctccgcctccaccttttttctcttgcaggaggtgtctagcagcagcctcctggggagcaggttggcccagtggcacctgtcctgggggactcagggtcttggcctgagttccatcggactgactttcccagcctttgctctctcatgagggaagctgttccccctgccaggttcttgggcagagctggctgtctctgaaggttgggccttgggaaggacctgcatcacagggaggctgggctttcctgggagcggcagggcaggcttggtccagggcgggggacggggctgaccagcttccttcctgcacggggaccagtagctccgtcccacaatacatcgctgtgccctgagccaccagggaccccggtcacctgatctccgggagagcctgctcccctgtctacaccagtgtgcctgtgctggcggctcagaacaaagaggccatccccaccctgcctctctctcccactggctctctctccatctcaggccgccaggtgaacctcctttcctggattccgtgctcttgggggactccctgggggccacctcggtcctcagaagtttcctggagcatagcccctggccccgaagcagtggtccccatggttttaggacctgagatgccatctgtccgccctgaccctgggctgtgtccctccccagggtgcactctgtggtgctggccttgcccgggggccgcctccggaggacccagttccaccggcttctccctcactccctcctctggctgtgacccaccgtccagcgtgaggcccaccgctctggtctgtttccccggaatagccgccggccggctccaggatggagaccgcgccaggcggacaggagccataaatcacgcggtgcggaatgctgggctgggggagggggtgacagagccacagagcaggctgcaggggcctcaggctgtaggtgatcggctccagtgggaggtgccgtgtgtggggacggggctggcacccagaacagtgcggagaacggcccaaggtcgcacagcggcctgccttccctcctcccgagccgactggctcctgctcctgagcagaggctctggcctggacctctgcaggctgggaaccctgtcctgcctgtcggcaaggaagccggcgccacccctttccagcctgcgccacctggggagtccggctagggagcctgaccctcctgtcagggtacttgggaagagaggctgtcaggaaatgtggggcagaaggaaggatacatgctggccgggcacagagctgctcctccagggtcttggcccgcagcgggcaccccgaggaatctgcctgcccacccgcctgctgtgcagagtggagcccctgtcaccacgactccagatgcccccagaggcagatagccctggtaccagccaagagccgccggtctggcatgtgctgtgctgtgtgtaggcacctgtgcccttcagcctctgaagcccttgggccagcattgcccaggccacagcaaggtagcgtggtccctgctcaggtgcagcacagaagtgccaggtgataagtctcatggcacacggagggctttcaggggcagctgtcagtagcaggagccatttactctacatttgtgaggaggtagcagtcaggaaggcctcctggaggcagcagcgtttcagtccagacccgagggtgactctcaagaagccaggcagagaggagggggcaggggagcgtattccaggcagagggcagtgagggcagaggccgatggccagagagggctcattcatggggctgaatggagttcattgtggccagaacatggtgcgcccaggaggagggacgcagtagcctgggcgcgggcggcagaggctggaacccgagaatggtgggcccggggaaggctgggggctaccctgcttgccccgagggcttcagcgcccctgaggttctggtatgatttttggggtcagtgaggaaactgaagtgcaggaggcaagtggccgtctgccttccacagccaggcctgctgcccgcccaggcccaccatctgtccgtctgcacactgggggcctggatgggcacggagcgtcctgtgtcactgtcccacatgtggggtagtctgacccactcagcccgctggcacttcccatacctgtggttggggaacagggggactccgccagctctgccccaggtcttggccttcaggttgaagaggagggatgggcccactgctaccagatggggggctgccagcagccacccccatgtcccgctagtccttctcccatcccctgtggccccctgccctgcccagcccagctccccaacctgcccgctggctgcagcctcctgctctgcttcctgcccactggtccccctcccatggcagcctgtgaatgttttcactgatgggtagagtggtcggcatcacccctgtgcctagccaggggcacctgttccccgcccctccaggacagtgccccctgtgtccctcatacctgactgtgctgcctctactcttgatctgggggacctgggttggggaatcagtgctggtagctcttagctggacagggtgggtccgggagttagagaacttgtatgtgccggggaggggacagcctggggagggggccagcacatgggccagctggagggggaatggtcccatccgatcagctttttttttttttttttttgagatggagtctgactgtcgcccgtgctggagtgcagtggcgcgatcttggcttactacagcctcctggcttcaagcgattctcctgcctcagcctcccaagtaactgagattacaggcacgcaccaccacacccagctaattttatgtacttttagtagagacgaggtttcaccatcttgaccaggctagtcttgaactcctgacttcaggtgatccacctaccttggcctcccaaagtgctggggttacaggcgtgagccactgcgcccagtctcattttttgtatttttaatggagacggggtttcgtcatgttgaccaggcttgtcttgaattcctaacctcaagtgatccacctgcctcggcctcccaaagtgctgggattataggcgtgagccaccaggcccggccccagtcagccttttaaaaactccctgtgtttcatttctatttaaacttgtacaattatgcgcttgtcctagaaaactggagtcaacagcagagcagtccggccggcgccctgctgcccgagtgggccgcctcggtacaccgggccggtgcttgccgccttctccctttgcatgtgtgattgtaggaatgtgtggctgtgtcctggctgctattttataaccaccccccatactgtgagcatctgctcacagcgttaaatattcatcgtcagcagcatctcgtgaggctccctggcagccttgggtggagccaacggctgggcccttcttgttgggctctcggatcgggcccaggggctgcttttcgtgcccgggccggagggcctggctgagcacctcaccccagaaccggctctgcctggcagggcccccgtggtcacctgatcttgcacctggccccaaaggtgcatctggttcagtggtgcccttgccttggtcccgtggccttggatgctgggcagcccacgaaaccatctcccccttggggaacttcatgcttcagtggcccaacaagaaggagcagcagagtgatgtagggaaactgagtcgctccttaggaggagaaggtttggagaaaagtgaggtggcggggggtgcggtttttaaatggggtgctcagcgaaggctttccttctggtgacatttgtacaaagacaaatatagggccatgaggctggtcgggggaggaaggttccagaagagggaatggcaggtgcggaggccctgatgcagcatggctggtggggcccaagcaggaggccagggtggtggccgtgtgtgcgccggggtgtgtgtggccctgagcaggggtactgagggtcaggggtctcctgcggagccatcccagggggcgggctctggctgctgagaccggcagagctgggggcagtcgtctgcaccgggcgggatttgaaaacagagctgacaggactggctgagggagtggatgtttgcaggacagcagagacgggggcttcatggatgccacctgggtttctggccccaaacagctgaccccgagggcagaagggcaggtttgagggagaccccacagccccttccccagcataggggggccgggtgtttggggggaaccgtcagcggcccggggccagtggcacagcagtgagagcacagggcacctcccaggcccccagcagagaagcacagcccggtctcccccagagggaggagccctcccagggcagggaccccagagtcttgttcttcaatgactgggccctgtctgccccaggcatgggctggcaacaatccctggccagctgggtggctcccttgctgcctgctggggacccacccttctcccctacctccttctgagacactgaggggtggggtgtctgtgttttcacctccgacccagcctggaagctcaaggcccagctcaggtgtaggctcccgtgcagcctccctgcccctgaaccattgctcccctggcactcagggcagacctgggcgcgtctgcaggtggcctgtgtgcccccctcccaattaggcggccttcctcaagggcccagccgggactccacagcccatcacctctgcagagactggctgtgccctgagcatataaacgggaaccggctgtggcagccccctcttcctgagggccagccacagacccggcaccggtccccgaagaaacaggtcaacatgggcgggacgtgcaggctgaggccacagaggccctggcagggctgggagccgagcccagggagtctggcttttttcttttttttttttttgaaatggagtctcgctgtcgcccgggctggagtgcagcggcaggatctcagctcactgcaagctccgcctcccaggttcacgccattctcctgcctcagcctcccgagtagctgggaccacaggcgcctgccaccacgcccggctaattttttgtatttttagtagagacggggtttcaccatgttagccaggatggtctctatctcctgacctcatgatccgactgcctcggcctcccaaagtgctgggattacaggcgtgagccactgcacccggcttctcgtgggttttaattgagaaagttccaagacagtgctggtagttgaggtgcgatcccatggctccggttcttgtaaaggccctgtcgtgggtgcaggccacaccactgtgtgcactgccgtcctgggagcacctgggagcacagacatagcctgcgaagctgatgagctccagcctttaccaggggcagttcgccatccctgttctaaagggcttgcctgtcatctcgttgtctcgtctcccggccactgcaaggctgccattgtggccagattctcgctcccccacgctcttccgatattttttacacttataaacaaataggtgtttactcagatgccttctctccattttcattacacaagtgatagcaggacgtgcacgctgctcagcgtttttgctttgtatctaaatatattttttaatgtagacacagtcttgctatgttgcccaggctggtctcgaacttctgagcccaagcagtcctctcacctcagcctcctgagtagcgggaatgacagctgcacaccagcacacctggctcaggcttatttaaaaactttttttagagacaaggtctcactgtgttgcctgggctgggctccaactcctgtgctacagcgatcctcccaccttggcctcctgaagggttggggttacaggcatgagccgctgtgcccagcctgcaagtttctttgaacgcatgtttccatgtattgagggaaaatactttggagtgggattcctgattcctgggtgatagggtaggtctgtgcttacctttataagggtagtttcccagagtgatggtactgtcttataaccccaccagcagagagttctgattgctctacacctttgccatctcttagagttgccagtcctttcattttagccatgctagtgggtgtgtagagaggtattttattttattttacctcattttatattattgatacagagcctcactctgtcacccaggctggagtgcagttacacaatctcggctcactgcaacctccgccttctgggtttaagcgattctcctcagcctcccgagtagctgggattagaggcgtgtgtcaccatgcctggctaatttttgtatttttagtagagatggggttaccatattgtccaggctggtcttgaactcctgacctcaagtgatccacctgcctcgcctccacagtgctgggattccaggcatgagccaccgcacctggcctgggtgtgtagagaggatttaaaccggtcttggatttctacacaaatcgcaggggcctgaaatactggctgatattttgtggaggattttacatctgtgttcatgaggggtattcatcgggaattttccttccttgatgctgagttgtgaggttttggtatcagagttatgctggccttgtaaaataagaagtatgctttccttctctgttttttgaaagagtttatgtacggtttatgtggtttctttccaaaatgttttatagaattcaccgatatggacctgcattttctttttctttttttttttttttttttttgagatggggtctgattctgttgcccaggctggagtgcagtggtacgatcatggctcactgcagcctccacttcctgggttcaagcaatcctcctgcctcagcctccaaagtagctgggactacaggtggtgtgcacctccacacctggctaatttaaaaattttttgtagagacaaggtctcactttgttgcccaggctggcctcaaactcctgggctcaagcaatccacccacctcagcccccaaagtgctgggattacaggcatgagccaccatgcccaatctggacctgcagttttcagaaaaggttttaattatggatccaacttccttaacaggtaaagagcttttcaaacttcctgtatcttttggtacccgttttggtaatttgcatctttgggaggatttgtccatgtcactaagttgtcagattcattggcataaagtttcaccttttattcccctattgaaccgaaaagctgtagggtctgtactattgttctttcatttctgatattggtagtttgtgttctcactgtctttttgttgttcagctagagttttgttttttttgttgttgttgttgtttttggtggttttttttgagacagagtctcgctctgtagcccaggctggagtgcagtggcacgatcttggctcactgcaagcttcgcctccctgcaagctccgcctcccaggttcgcgccattctcctgcctcagcctccctagtagctgggactgcaggcgcctgccactacacccagctaattttttgtatttttagtagagatggggtttcaccgtgttagccaggatggtctcgatctcctgacctcgtgatccacccccctcggcctcccaaaatgctgggattacaggcgtgagccaccgcgcctggccgtttgtttttgtttttgtttttttgggtttttttggaaacagtctcactctgtcgcccaggcagtggtgtgatctccactcactgcaacctttgcctctcagcttcagacaattctcctgcctcagcctcccaagtagctgggattacaggcgcccgaaccaggcctggctattttttttttttttgagacaccacaccctgctgtttttttaagagatgcggcagccaggcgccgtagctcatgcctgtaattccagcacattgggaggccgaggtgggcagatcacctgaggtcgggagttcgagagcagcctggccaacatggagaaaccctacctctactaaaaatagaaaattagccgggcgtggtggctcatgcctgtaatcccagctgttttgggaggctgaggcaggaggatcacttgaacccaggaggtggaggttgcagtgagctgagattgtgctattgcagtccagcctgggcaacaagagtgaaacaaagtctcaaaaaaaaaaaaaaaaatggggctggctgggcacagtggctcacgcctgtaatcccagcattttgagagtttgagatgggcggatcacctgaggtcacgagttcgaaaccagcctggccaacatggcgaaatcccatctctactaaaaatacaaaaattagccaggcttggtggctattcgggaggttgaggcaggagaatcgcttaaacccgggagacggaggttgcagtcagccgagatcgtgccattgcactccagcctgggcgacagggtaaaactccatctccaaaacaaaacaaaacaaaacaaaacaaacaaaaaccaatgttttctgactgcgcctctgcctgtcagtccagttgtaagtaagagggtagggcccaggcttgtgagcaccatggccttcatcccgtcagtaccccccgcaccacctctgtccgggtgacgtggccaccctgcaggcaggaggagagcaagggccgggtccggtttgtgctcaggagagaggaggtatggcagtgtcctgctggcctggctgggtccagctctccccgccaggcagctcggcacttttcggtttcctaagtagacgcctgcatcccacaggctgcgaaggtcacccagcaatctgagtggccgtcaacaggacacaggccatggtgagcggccccgagaaggggatgggcgggagtcctccctcatcctccttcctgggcggcccccacctctgccccacatatctgtccagccaacttcccatttcctgtttcctggtctgaagaggcgcaggctgggaaaagcgactgggctcgggggacctgccagggaccagacatgcccctgaccccgtgtttgtcttcagtcccacagaacaacgagaagcttcaggagagcccgtgcatcttcgcattgacgccaagacaggtggagttgatccggaactccaggtgtgcggcacctcccccagcccagcaccccaccgcccgcccacccactttctcctgggctcactggggagagccggcagccacgtccactgcaggcctcgctcgggctcagtccagaaccgtgctgcaaggcagtggccgggtttgcttccttccagaaaaccccatcctgggtctcaggtgctggcctgtgtgcccactgcctgtgccctgcagcctgctagagagaggcggactgactgtgcccttttaacacggtcttgccctcctgggcccatcctgggcattgcagggagcggaggagcattcctcgcctccacccacgccatgacaagaacacacccctgttgtgacaaccacagatgtccccagacattgtccagtgtcccctagggcaggataacccgggcgagacctccctgggttaggggattccacgtatccccaagagactctgtgtcccatgatcctctgccctgctgaggtcccagaaggctgcatacattgaaatccacaccctgaattggagggggagaaagtaggtgaatcccaggagctgggggtccccggtttacaccgcccgccttaggaatttattctggtgtccagcatgagcaggaagttaagtcaggtgtttttttgttttttttttttgagactgagtgtagctcttgttatccaggcttccaggctggagtgcagtggcgcgattttggcttcctgcaacctccacctgctggattcaagcaattctcctgcctcagcctcccaagtagctgggattacaggcgctcactaccacgcccggctaatcttgtatttttagtagagatagggttttgccatgttgatcaggctggtctcgaattcctgactcaggtgattcacccacctcagcctcccagaatgctgggattacaggcgtgagccactgcgcctggcggaagtcaggttttttcccagttatataatgaatacggggtttccccctccataccgtggatagtgaggtgggatggttccctcggtggggccgtcctgggcactgcaggctgctgagcagcatccctggcctccacctgctctgtgccaggaacacccctaactctgacaaccacagatgtccccagacacagctcggtgtcgcctggggcagggtcgtcctcagatgaggacggttgaactgtggcaggtgaggggccagtgtggctgccctgcgctctgctcctccctcagtctctccgaggctgtactgcctccagctgagacagattcctgctgggcaggctaatggtaggtgctgggcccttaggacaggggaggccatttgcccaggtcacccctgagtccatggcagggctgggccgggcgcccccatttaatgcctagcttctcgtgcccagccgcttcagacccaccgcccccacctgctgtggggccaggttcctggggcctcccagcctggccctcacacctagtaagggttcagatccagccgagccaggcttggccatggaggcctctctgcctgggtgacccaaggtggcgacctcgtctttctcagcctcgtcttccttgtctatgtacctgggtcagcacagcctccacctgcactgggtccctgctgcagagtgctcagagccagccacacagtataaaaaaatcagtttgggctgggcacggtggctcacaactgtaatcgcagccctttgggaggccaaggcaggtggatcacgaggtcagaagatcgagaccatcttggctaacacagtgaaaccccgtctctaccaaacatacaaaaaaattagccgggtgtggtgacgggcgcctgtagtcccagctactcgggaggctgaggcaggagaatggcgtgaacccgggaggcggagcttgcagtgagccgagatcctgccactgcactccagcctgggcaacaaagggagactccgtctcaaaaaaaaaaaaaaaaaaaagtttggttttctcctcagaaagcttctggacatttctttttctttttcttttttttttttgaaatgaagtcgctctgtcgccaggctggagtgcagtggcgtgatgtcggctcactgcaacttctgcctcccaggttcaagcgattctcctgactcagcctcccgagtagctgggactacaggtgcgcaccaccacgcctggctaatttttgtatttttagtagagacagggtttcaccatgttggccaagatgatctcaatctcttgacctcgtgatccaccccacatctgcctcccaaagtgctgggattacaggcgtgagccaccctgcccatcccacatttctttttcttatgtcgagatatgatttgcataccatagaatatacagtttttaagggtgtcatcgagtgggttctcgtggatcagtaggtatcgcagctcccaccactgcctagtctcagggcagtcatgtccatccccagcagctgccacccttcatccactggcccccacgcatcccctcctgtctgtaaatgggtctgtcctggacatttcatagaagtggaatcacatactatgtggctttcgtttattattattatttaagacagaatctcactctgtcgcccaggctggagtgcagtgtcgcgatctcagttcactgcaatctccgcctcccaggttcaagtgattctcttgccccagacttctgactagctaggattacaggcgtgcaccaccacactcagctaatatttgtattttttttgagacagagtcacactccgaggcccaggctggagtgcagtggcacgatcttggctcactgcaagctctgcctcctgggttcacgccattctcctgcctcagcctcccaagtagctgggactacaggcacccgccaccacgcctggctgatttttttttttgtatttttagtagagacggggtttcaccatgatagccaggagggtctcgatctcctgaccttgttatccgcccgcctcggcctcccaaagtgctgggattacaggcgtgagccactgcacctggcctaatttttgtatttttagtagagacgaggtttcaccatattgcccaggcttgtctcgaactcctgacctcaagtgacccacccacctccgcctcccaaagtgccagggttactggcgtgagccacctgccttgtgtgtcctttcgtgtctggcgtctctcactgggtgggacatcctcacggtgcacctgtgctgaggcctgggtctgagcctggctcctttccatggctgggtcgcgtcccgtgcgtgttggtccttcggtctacggaaggacactcaggatgctgctagtttgtggctgttgtggtcagttctgctgtgaacatccacggatgcgtctttgggtagatagactttttcctcttcttctgggggcgtttcttgttaaagtttatcctcaggtgttactggtttttgtttttttttttttggagagtgtttctctttgttacccaggctggagtgcagtggtgcaatcatagcttgcagcctgtgcctccatgggttcagacgatccccctgcctcagcctccaagcagctgggaccacaggtgtgcaccaccacgcctgggtaattttttgtggagacagtttcaccatgttgcgcaggctcgtctcaaattcctgggctcaagagctccgccagccttgacctcccaaactgggtgttttcttgccattgtgagccagctgctagattcccgcatgcacgttttagctatgtttcttcgcagggagaggcacctggctgccctctctggttcagggttttgctgtggattctgttgcattttccagggaggccagcccctctcctgacctcacagccactcctctcacccagcccgtacaaaagagtcctgggcctcagtttcccagctctgggggagggagccttgtggtgtggcggtctccaccttgtcgggtgggctggggtcacgccctcctcactcagctctcctttcctttcctctggtttgctccacacccacagggaactgcagcccggagttaaagccgtgcaggtcgtcctgaggtatgcccaggtgtgcccgcgaccccagggctggacccccagccacccgcccctccccgccccccagtcctggcccaggcccttctcagtctcccctgctaacagcagagcccagctctcctcacctgctgtctatccctgtctggggatacatcaccatccgacccccactcaggccacacccgggggccctgataccccccgtgtcacattctccggtgcccccatcactgccgcctggctaccactcgtgtacccccgcagcagcctagtccctcctgtgcgccccctccccgccccatggtccctgttgtcgttgcagaatctgttactcagacaccagctgccctcaggaggaccagtacccgcccaacatcgctgtgaaggtcaaccacagctactgctccgtcccggtgagcatgccccgcccccgcgtcggctgcacgggtttggggggcgtggagggagggtgggggccgtcggatttcccagccgctcttggctcgaggctgagcggcccatctgcttgcagggctactacccctccaataagcccggggtggagcccaagaggccgtgccgccccatcaacctcacccacctcatgtacctgtcctcggccaccaaccgcatcactgtcacctgggggaactacggcaaggtgagtgcgtgcccgggtgcccaccctgccccccaaccccggccccgtcctgccagccctgaccccttccttctgtccccagagctactcggtggccctgtacctggtgcggcagctgacctcatcggagctgctgcagaggctgaagaccattggggtaaagcacccggagctgtgcaaggcactgggtgagcagctcaggccacctcggccgaggggtgccaagtccaccctggaaacccgccctgtgctgggtgaagcggggggccctgcacccggaggagatcgatcaggggccgcctgtcactctgggggtccatggccccccggctgtggctggggaggtctctggaggatacggatggcagagggggcacttggcagtgggagctgctgtgcggaggcctgtggggtcacacctcgtgttgctggccccaggtgctccagcccacaggggtctaagcagcagaagagctggagcctcattccgggacagcacagaggccgggaggggtgagaggagcacagagggagctgtggtctaagcagccccttctcgttgcctcagcggggccgagggtgctgcgggacctggcgggtcacggacggccagggtcgtggaggcagttgctgtgggaggaagacgggcggcggcggtctgacctcacgttggtgaggccccgtttaatcttttttctttttctttttcttttttttttagagagtcagggtctctgggaggtagaggttgcagtgagctgagactgcatcgctgcactccagcctgggctgcagagcgagactccacctcaaaaaaaaaagtgtctcggtgtatcgcccaggctacagtgcagtggtgggatcgtggctcactgtagcctctaactcgggctcaagccatcctcctgcctcagcctcctgagtagcttgggaccacatgtgttcaccaccacacccaactaatttttttttttttttttttttttttttttgagacagagtctcactctgttgcccaggctggagtgcaatggcacgatctcggctcactgaaacctctacctcctgggttcaagcgattcttctgcctcagcctcctgagtagctgggactacaggcatgtgccaccatgcccggctaattttttgtattttcagtagagacggggtttcaccttgttagccaggatggtcttaagctcctgacctcgtgatccgcttgcctcggcctcccaaagtgctgggattacaggcgtgagccaccacgcccggccccaactaattttttaatgtttcgtagagatggaatcttgctgtgttgcccaggctggtcgtaaactcctgagctcaagcagtgcacctgcctcaatctcccaaagtgctgggattacagtcttggccactttcgcacctggtctcttttgtccttgtaacaatgaaaacaattttttttaagtgacacgcagagcaattttaaaagaaagcctgccggcaaggcgcagtggctcacacctgtaatcccagcactttgggaggccgaggcgggcagatcatggggtcaggagagcaacaccatcctggctaatatggtgaaaccccatctctactaaaaatacaaaaaattagccaggcgtggtggcaggcacctgtagtcccagctactcgggaggctgaggcaggagaatggcgtgaacccaggaggcagagcttgcagtgagcggagatcgtgccactgcactccagcctgggtgagagtgtgagactccatctcaaaaaaaaaaaaaagcctgccaagcctggtaggcaaatcagtcctcaccccaagcagccacgcagcacaaagccagcgtacagcagttagccctgcctggcggctgtgtggcctcagaaagtcgctggccttctctggtggccactgtcttcaggagaatagatctgagccatcttgagggcacctggacatctctctggaccccacatgcttggggcccaggcctcagtgggctctgcaggcctgtcttatggagaggctaggcctaacctggagtcatttggagctgggagtgggagtcaggcaggtgggtgaggactgggaccacctgccaggctgacgagagggcggttctgggccagccgggtttgctcgcacccccttcccgaatggtggctgttttcaggtggaatctgggcaccaccccagccccttggcagaatgtgggccagagggtcttccagctgcccctcctagctgcccaggcccctgtgcccaggccagagagttccccatgagcactgccctcctggcacagccaggcccaggcctctggtccctgttcctgaccaccaaagggcacctccttgcctgggtgtccagaagcctggagcagtgctggcactgccaggggcctgcgagccccatcgtgttgaagcctcctgtgcactccagccccccaagtcaggaaagatagccggcagcaccccctctgcagagcaggacgtggagggtgaggggtccctccacggagtccggcatccttggccagcctcctccaggctcggggatggagggcctggctatgtacccgtgtgaccagtggggacactgaggcacagagtggcaaagttagggttctgtgtcctgggttaccccgccccacctccctcttccctcaaagggcccttttttcaaccgcccccgaccttccctgcctgtggggacatggccaacttgagggaggaggctggggccgggcaggcctcttctaggcccacggggtgggggccgggcttaactcctcagtgaccagagcccgcagtgctgggggctgtggggtcaggcttcctctccgaaggggtctcctgctgcttcccacagccggccccaggctcagcctctctgtcactggatttctttcttgctgcacctaggaagtcctcacctttgcctcacttgaacccttcctgctgcgcacgtctctccatacacaaaggagggagagtttgctttaaaatcagatgggcacctgcatcccctcctagctgcccctttgccaggcttgagggtccacccgggcaccgggtagccagagctgggatccaaggatggaaactcagctgaggagtgagcggctggggcagccttggctcaagcaggggagctgctgggagccagcacgtggctgccaccacgtccccacgggagaaggaagagcccactgctccacaccccggctgggggtctgggtgggggtcaggaaggaggaagtggctcccaagcgggcagagataagtggtgtttcaggccaataaggggtggtaggggcatttccaggcggaggaacgtcaggacagctggggggagtgggggggcaggctggcaccatcactctggaccccaagtcacttgggcaggtggcttcctggaggaagcaacactggtccaccaggcagctgagggccaggtggtggatggagaggccctgtgggttgtgggccagggtggcctgccccccatggcccagggctggggtctctcctgagctacccatggatggagtttaccctgggatggagccacatcccagaagcctcaggagggcagccagggtccctgcgtgagtttccttctggctgtgggcctgctgcccgtcgaggggagggcggcgcctgcctccaagacttcatgtttcacatatgtttccccatgttccgtgcagcttgctggcgggcaccgtcttttcctttaaagaagcagctacactcctgtctgcaggctgccttggggcggtgctggggctgggcggcagccgcttgctggctcacagccaggaagccccaggatccgtctcccaaagagtccctgcctcattccccgctgtggccttggggatggtgcttcggtgacagaatgaagtcacagcaatgactctttcggtggctgtgttgcatgaaacttgccagaaaagtcccatgggtcatagtccacgcagggtgggggaggccacataggccacctccgtgtgggggcttcggctgggtctgtgctgtgcccaggttgtggtcaaatctaatggtggttgccacccggctttctccaatccctcacggccccgagccacacagcgaagcttgggactcatcgtcaggggcctgttctgggaggtggacgtcagtgccggagagaactcgaatcacagccccgcgccctgctgttcccaccctcctgacggtgtcttccgttccctccccacagtcaaggagaagctgcgccttgatcctgacagcgagatcgccaccaccggtgtgcgggtgtccctcatctgtccggtgagtcggggcgcggtcccctcctcgaggcctctcctgcggccggccttcccccctggcggccctgggcccggggcggcttggctgggccgtgagcctgcgggggcgaggctggtcttcgtcccctccgtgttcctgaggcatgagtgattggagcgagccacaggatggagctgggggtgaggggcaccgggcaggcgggcacaacaggaggggtgccctgctcacgcagcccctcccccacagctggtgaagatgcggctctccgtgccctgccgggcagagacctgtgcccacctgcagtgcttcgacgccgtcttctacctgcagatgaacgagaagaagcccacctggatgtgccccgtgtgcgacaagccagccccctacgaccagctcatcatcgacgggtgagcccggggccccggggagggcggccggagccggacatccgtggaggtctcggtggcaccccgcttcctgcagaccacatggtgccccagcaagacacagcagtgggggcacatggtcctggagctttggaaaccccgggctgcgaaaagagccggtttctttctcgcggaacttctcagagcctttgctatgcaggtgacagccacgtagcttaggttgcagaaggtgggctccggtccaccccgctcccacgtgacctcaggcaagtgtgaccctgagctccaggagtgtggtttgtgccacaaaaaactgagccaggtcgtgctttcacacggcgttcaccccaggacgcgcagccttgggggtgacctcctcacagaaaggcaaaggaggtggcgcctcctggagcactctggctacgccatgcccttcccttcctaggtggcacagctgtggccaggcattccccaggccacaggggacaggaggacaagacctttctccctggtggaaggctctgcccagggcttaagtttccagaaactgagccccgttgtctgtggtgcctgatgcggctcctgcccggcgccgaccgcgcccacctcgtccccagagccgccggcagggcgcgaggccacagcggcacaagctggcgccctcacaggcgggagcaggccctgcctgtgggggtgggccgggtccccagccctcaggcatggcctcagcggactgtgcaggtgaaggcagggctggcctgcctctggggttgtagatttcatccccaggtggacctccggttcatgcacttgtccccatcccaggagacagacctgtgagcgtcctcagtttacagacgaggaaacaggctcagaggaggcaaccagcagctggagctaccccggctcacggggccaggctgagacttgaacccagcctgagtctgggtcccctctgtggagggctgggtggccacccccttgcatcccagcttcgggtagagagaggagtcctttgggccgggcacgtgggctgcctgaatggctgctctgttcccagcctgacagctgtgcagccgggtgcccgccttcccccacaggcccggagtggggcttgggcttggggtggcggcagctctcacagctccagggccaccagggctggggcaggcagctgtgtcccatgcaggccttggcctcagcagcccatgggactcggtgtagccagggaggcttcctggaggaggggtccttggttcatactttgttccatgagccctatcacctctctgtccctggctctgagctgggtgaccccagggtccccaaaagagccccgtcccagaccctgccttcagagtcttgttcttggccaggggagcggatagaggagcagagccagacataaacgttcccgttgctgtgtgtgtcttggggaggaggaagagaagctgtggggtggggctttggagggtgaaaagcagttttgcaagcagggaagtgggcaggcagggctgtgctacgcctggggcggccctggcacggtgggctccgagcatcgcctcagagagagctcggcggggcggaggggctggcctgggtgagagcctcagaaagggtggcccagagtgggacgagggctctcctgtgtgatgagaacgatgccactgcgggtgcctgggagcagctgtagccttgacagtaacaggccagcctgggccctgcatggacccgtggggcagggggcctctcctcagacgccccccagccactgcacctttcccttcctgcgggtggggagactgaggccctttggctaagacgggttggggagcagaaccagggcctgcctccagttggccttgtggcctcagggaactcgttcccttcccgagcctctgtttctgcatttgtaaaatggggctggtaggacctccgagtaaaaaggccggacacagtgggggtgctctggagaggctgtggctggcatgggcgtggggagcccgcactctgctcccattgctaccctcacagcctctgcaggggctttgagcagccagcaccttcactccagcctgtttcctgatctggcgggcacacagtgcaatgtgaaagcaggtgtgcgtgcacacccacacccgcatgcccacacatccatacagtccacaccatcacacacacacacccacacacatccatacagtccataccatcacacacacccgcacacatccatacagtccacaccatcacacacacacccgcacacatccatacagtccacaccgtctcacacacacacccgcacacatccatacagtccacaccgtctcacacacacacctgcacacatccatacagtccacaccataacacacacatacagtccacaccgtcatacacacacacacacatctgtacagtccacaccttcacacatccatacagtccacaccgtcatacacacacacatctatacagtccacactgtcacacatccgtacagtccacaccgtcatacaaacacacacacatctatacagtccacaccgtcacacatccgtacagtccacaccgtcatacaaacacacacacatctatacagtccacaccgtcacacatccatacagtccacactgtcatacacacacacatctatacagtccacaccatcacatgcacacacatctatatggtctacaccgtcacacacacacacatctatacagtccacacctgttacatgcacacatctatacagtccacaccgtcacacatctatacagtccacaccgtcatacacacacacgtctatacagtccacactgtcacacatccgtacagtccacactgtcatacaaacacacacacatctatacggtccacaccgtcacacatccatacagtccacaccgtcatacaaacacacacacatctatacagtccacacctgttacatgcacacatctatacagtccacaccgtcacacatccatacagtccacaccgtcatacacacacacatctatacagtccacaccgtctcacatctatacagtccacactgtcatacacacacatctatacagtccacaccgtcacacatccatatagtccacaccatcatacacacacacatctctacagtccacaccatcacatgcacacacacatctatatggtctacaccgtcacacacacacacacatctatacagtccacaccgtcacatatctgtacagtccacaccgtcacacacacacgcccacacccgcatgccacacatccatacagtccacattcacgtatgcccatatgcatccattcacacgtgtgtacacatgctcacacacacacattcatagactccacacatgcacacgtgcacacacacgcacatgctcgcacacatgcacagatacactcacgtccacacacgctcaaacatgcgtgcacacccggaggtgcccagaggggcagggtggggaggacccctgcagctgccacactccctgctcttgtgggtagttgggggccactgggtatgtgtgtccatgccccgtccccccggcagtgccgtgcactgcagacctgcctggggctcagcacctgcaggggcctgagggcgggggagggaatgcggggtccctggacccctgcggtcggggtggtgaggctgctcttgcagagagaagtggggagtgcctggctgcatccgggagggatggagggctggggagttgggggggtggggcacctccagccccggcgtcagctgtccgcctcgccccaggctcctctcgaagatcctgagcgagtgtgaggacgccgacgagatcgagtacctggtggacggctcgtggtgcccgatccgcgccgaaaaggagcgcagctgcagcccgcagggcgccatcctcgtgctgggtgagtgcctcaccccaccagccgcgcagtccgcagccagggccgcctcagtttccccatttatcagtggttgcatcctaagtacctgcaccctgtccctgttgcccgtaggcccctcggacgccaatgggctcctgcccgcccccagcgtcaacgggagcggtgccctgggcagcacgggtggcggcggcccggtgggcagcatggagaatgggaagccgggcgccgatgtggtggacctcacgctggacagctcatcgtcctcggaggatgaggaggaggaggaagaggaggaggaagacgaggacgaagaggggccccggcccaagcgccgctgccccttccagaagggcctggtgccggcctgctgaccccggccgcacactcgactttcctggtgctcaccacgcagaggggcacgggccagcctcgggcgcagagggaggagtgacctttctttttctttttattgtcgttcgttttgtttttccacccttttgcctggctcctggcacctgtacctctggactctcctatcgggggattaaaaaaaaaagtaaaatgacaaaaaaagatacaaaaaagaaaaatgaaacaaaaaagtcaaactcttaaaaacaaggccggccacccacacagccgcctccccggctggagtccgagccgggaaggggtagtgggcgggagggaccaggacgccgccccgcgccctcccctccggatgccccgccgcccgccgccctctgcccacgaccattccagccagtgcgcggggacccgggcggcgggcggtggggcgcagcccctctctggcgaccactttgacgtttgtctcttcctttgctttttctctgcaaatgcatcctcgcccagagaccctcacgcgccgagcagcgagcgttttagccgagaagccatggagtgggttggggcggggaggggcagtagggtggggggatgggtgggcaggatgggggtacagtgggcggctggggagggtttagccacagatgtgttgtattttttgaaagtgcaataatttggtattttgaagacccggcgtgtggtcaggaacccccggggaaggcgggggcccagggtgcggcaccgtgtggcgtgggggggtctcagttttctagccagctacctcggtaattccaattcaggttaacttccctacggaacagcacagatgtccacagatgtccacagctgccgccgccgccgccgccaccataccccggtccttggggcatgggttgcggtcgcttcccaaggggcagcagggaccccggccaccccggctctcggtttgggttgattcctctcctttttgctcttggttttccgacgggtacgaggctggcccggcaccctgtcccccgggagcctcactcttccagcaggaccagaccaggggcctccttcctgtccccaggcgttcccggcccctcgcaggccccacccatgcccttggcctcagggtccaacaactgggggagctaccagggctctgccttcaggagcccacagctgggcaccccccttgccccgcaggagaccggggcgcaggcggggcaccggcctcacctggttctccaacaccgctgcctgcggtctgttttgcttttgtcctccccagcccagaattttcctttgtataaacagaactcctagtcaggaagcaatatcatttcaggtctaaagaaagggacgtgcatctggccgagggcagttcagtctcactgcagagcccgcagcccgctgcgcagctcggcccctcccgcccgcacgggcagctgaaggccgctgttttctaatatttgtattctaatttaattgtttttaaaaaatgcaaataaaaaaggtcgaggtgaagccatccaggcgtccgcttttctgtgccctgtgtctcttaagtgtgtaccctgtagtcggggggcggagttgggggaaggacagaaactcagcctcacccacatctctctttcttggttattgcctcagcttcagaattcaaaaggtgctgctcgtggtcaaatgaggcagatttttatttatttacttatttttaatagagacagggagtcttgctgtgttgcccaagctggtcttgaactctgggcctcaagtgatcctcctgcctcagcctcccaaagtgctaggattacaggcatgagccaccatgcccgacctgaatgaggccagttttactgtgtactgtactgcctgggcctggtgtccaccacgctgggagaatgggagaagggacttgggctgtacatggaattcaggtcccaggatcgtccatgtctctgggtggccaagacgatacacaaatgttttgcttttgtaaggtgaaaaaaaagggccgggtgcagtggctcacgcttgtaatcccagcactttgggaggccgaggcgggtggatcacctgaggtcaggagatcgagaccatcctggctaacacagtgaaaccccatctctactaaaaatacaaaaagctgggcgtggtggcgggcgcctgtagtcccagctactcgggaggctgaggcaggagaattgcttgaacccaggaggcggaggttgcagtgagctgagatcacgccactgcactccagcctgggcgacagagcgagactccgtctcaaaaaaatatatatacagacaaccaatgagcacatgaagagatgttagggatgtgagtcaaatgcacggtgagatacctgtcacccccaccaggacagctagcatcaaaaacagcagcgagggtcagggaagctgcagtccacatggctggggaagataacgtggtgcagccccttggaaacagttgaggctaaatgtggagttagcgtgggacctgcaatgccagccctagacgtgtccccaaggtaagtgaacacgtccgtccacacaaatgtgctcacggacgtgcacagcagccaaatgtggcaatgacccatgtccagccggggagtgaatcagtgcagtgtggccatccacactgcagaatgacagccatggaaaggagcgaggctctaacacaggcccccagcccagacgaactctgaggatgccatgcttagtgagagacatcagacaccaaaggccacgaggcgtgtgatcccatttctgtgaaatgtccagaacaggccaatccacagagacaggaaggggattcacgggtgctggagagtggagaaggggattgagagtgatcacaaatggatatggggcatcctttgggctggatagaatgttctggaattagtggtgacaggtgcataatttttttaagggaattttttgtttgtttgtttgagacagtctcgctctgtcgcccaggctggagtgcagtggcgtgatctcagctcactgcaagctctgcctcccgggttcacgccattctcctgcctcagcctcccaagtagctgggactacaggcgcccgccaccacgcccggctaattttttgtgtttttaggagagacgggggtttcaccgtgttagccaggatggtctcaatctcctgacctcctgatctgcccacctcggcctcccaaagtgttgggattacaggcatgagccaccgtgcccagcctttttttttttttttttcttttgacatggagtcttgccctgttgcccaggctggagtgcagtggcaccatctcggcttactgcaaccttcacctccccccaggtttaagtgattctcctgctacagcttcctgagtagctgggactataggcgtgcaccaccacgcccagctaatttttgtatttttactagtcaccatgttggccaggatggtctcaatctcttgacctcgtgatccacctgccttggcctcccaaaatgctgggagcattacaggcatgagctgccgcacctggctttgaagagcaattatatggtgtgtgaattacatttattttcatttctgagaaagggtctcactctgtcacccaggctggagtgcagtggtgcaatcatagctcacggcagcctcgacctcctgggctcaagcaatacttccacctcagcctccagagtagctgggaccacaggtgtgcaccatcacactcggctaatttttgtatttcttgcatagacgtggcttcaccttgtttttctggctggtcttgaactcctgggcttaagtgatcctcccttcttggcctcccaaagtgctgggatttcaggcatgagccaccgcgcctggccttgaagggaaattgtatggtatgtgaattatatttttgtatttttatttttgagacagggtctcactctatcgcccaggctggagtgcagtggtgtaatcatagctcactgcagcctcgacctcctgggctcaagcaatccttctgcctcagcctccagagtagctgagaccacaggcgtgcaccaccacacctggctaatttttgtattttttgcagagacgtggtttcaccttgtttttctggctggtctcgaactcctgggctcaagcaatcctccctcctcagcctcccaatgtgctgggattacaggcatgagccaccactcccggccctctctgaagcacagaggttaggaagcacctaaccctggcttgtggtcctgaggctgcggctccttcagcttccccatgtgggacctctgagcagaggcctcagtgtgccctgagggtccacggtgcagggggctcaggacacggctgtagaaccgctgacccccaaccctgctccagcgcgtgtcggggacttgggcacgaatcctggctgcagcaggttcatgggtggcctcgcacaggtatggtgctttagcatggggtccacacaaggacccggaggccctcagacttcgtggtgtggcctctgtggtgtttcctggcaagggctgggccaggctttgttgacttcctgtggctactaggaagagcccaatccacagaggaggagctggggttctgagtggacccagtgcccggctcagtgcagccattgctgcctcactgtgccatctgcttccatgagtgcctcatccatcccttggggctggccccatccccacctttgctggcctggacagattccttggacatgggccgagtctggttggaggacaggaggaaggaggaggccctccctcagagaccctacccagaggtaggggctgcagctagctgaggcttccggctccagatcctggctcatgtccctggggcctggcatggggcagcaccctggggtcctctagcagagtcaggtggcccccaggtgaggctaccccgcctggggcctcgggaaagcctggagccagtggtgcccagggcccagccctggattctgctgacaactcgcccggccggttctccctgctgcccctctggccttatcctgtgccagctgcctgcccgcgccaggggctatgggtcaccttccccgcaagaggggcctctggacctgggtactcctcggacactcacccccaccccggtgctctgggtcaccatccacacccagcctctctgccacgcgacagacggaccccagagagatgggcctggcttccaaggccgggcaggaagagcaggaagggtcggggacctggggcttctctccttgggacccaggatccggtcaccctgggcccaaaggtgtggtgtggacgaggtgctcaacccacccagtctcttcagggccaaaaggggaaaagggggaccccccccaagccccccatccccgctccccagcctcccccgaacaaaacacagagaacatcaaatgaggcgactgaggcggcagcggtcgtaacaggctgcgtttagtggttctttttttttttttatgtacaagaaaaatgaatttttttgttttttcatcttttgtgtttttgtttgttttttattacttttaaagcttctccctccccactcccaaaaagtgcatttttatcagttttttttttttttaaatctcccacactttataaagactctcaatacagtctctggaatgtctatctgtctgtgctctgtaccctgagggcgccgccccgccccccattcaccaggcctggcccctccaaagtccaaggcacctcgattctgggcctggggtggggtggggggcgggacctgggcatcggatcctggtccacagcctccaggcagccccggcgagggatgggggtctccctggccccctccaccccctgggcccggccccccccccccccccccgtaaatctatgtatttaatgcgagctagtcttaactctgaggttgtagctcctggggcacccccagcctccaggcccctgacccgtcctgcgccagccacccaccacccccccccccccacctccaggaaggctgcttcaacttaaataactttttaaaataaaactgcaaatataaatatctttctttctcaaaaaataggatttttgctttttttgttggtttttaatatttttttttcttctgtttttcctttcattctctctgtcttgcctccaaccattctggttgccgggcgggagggggcaccccgaggcccctgcctcagtgtcaccacctgtgaggtgaccgctcctgccacggccccggggtctgaatcgtgcaaagacccctgtcccccaccttccctgcagccgcccacttccaggggaagaccctggaagaggctgggggacccccctcggaaggaagcaaaaagacagtgacaggactgcatggccacaatggtgggggggcagactttggtatcgcccgctcgagcctgcctggctgcaggtccacacccatgccaggccgggcctgctccggcattttacattcactggtttataatttttttttttcatttttaaaaacttttttgactttttttttttttccttaatctcaaaaggcggggggcgtcggggggcagaggcaggtagcagcaacagctagtagcaaagatgcttctctctctctcctgggcccggcaggctggggggcactgcagacgggggctccggcccggccacctccccggcccccgggcgcccccgcctgaagccccccaaccccagcctggacctcactcccgctctcttgcacacacgcacacacgcgtccacgcaacttcaccatgagaatggaaataacaatttcgcattgtttttcttttttttttttctctttttttttttgtaccaggcagttaaaaaaaaaacaccccaaaaaaagaaaacacaaaaaaccccaaacaaccaaacaaaaaagctttgagctgtgtcctttcatatggagtcaacacgaccctcctcaaatatcatttttttttgtttgtttgtttcctgaaacgcgagaattcagcaggtatctttggcaacactttatcacgaccttaatttaaagaataaaaataaaatcgattcacgtctatatacagtatgtgattgcgcggagtctggggagggcggggctgggctgggggggtcccggctctgggcccatgcagaggctgtggcccccaggacgggcgggtagttaaggcaaagtgggcgggcaggacaggcgaagctgagtgcggagctaggaacgagggtttagtgcaatccccgaggtctgtgtaagtgtcgcggtgggccgcagcccttgttcctacggaagtcccagagggctccaccccccaagtccggtcgcccccactggctaggacgacagctgtgattttagagttggttttattgcgagggggtgcatggataggggaaggtggaaagagggctcacccctcagggggcctctctgggagctggggaggggtgtccctggcctgggtgttcaagctccccgctcagccacgacagatggttttctctccagaacagctcgccctgtgacactggggtgtgaacgcagccggggtgctgtcacccagccccaggggagaggggggatcctgagacatttggagggggctgacaggcttaagggggggtgggaagggaagggaaccaaaaccatcctgtagaaacaatatgaaaattgccttcttaaaaagcttccctttaacaatgaaagaaaaagagacgagaagatgtgtgtgtcacagagaagggggtatgggggggtcgggggcagggagacacccccccgccggttgggcattgacaagaagtctcagtgcagcagagcgtctattttcggggtcccatgctagcattgcatatgcaaacggggtgagggcgtcctggcatctggcgacatagtctccccaaccccggcccctgtccgtggcctgtggctcggtcaacaccgggccttgtgggagccagaggttggggggaggcaggtcccagtccccctggattacagtcagtgcctttgagtaaaaagaggggtgcctggggtggggagaggggcggtggttctaaggccctggaggtggggggcccctgtcacccacctcagcagggtaggcgcatccaaggtccagctccttggtggccatgcgggagggacaggcgtgttgggggattggggggtgccggatggggatcggggtgctccggctggaaggcccatccctgagctagggaggaggaaggagagaccccgtggacagaagcgggcgctaagacctcttcacgtcagaaccaaaaaaggggacagaaagggggagcggggggaacacagcacgaacaccccacagtcctgccttcgaggctgacgtctgggggtgaagcacaaacacctcggggcgtctcccaggtcccctgcgatggcttcctcctgaaccccccttctcgctttttggggaacagaagtggattctacgtttgtggtgggtttttttttttattattttgtacaaaaataaatcgacttttaggaatttcttctgctctcgctctctctctcgctctctctctcgctcgctttttttttttttttttgtcttttcaacttttcatagaagttggttgtaacttgtaaacatgtttttaaattaagaattaagataaagtgtagtacccgttccgttacaaagtgccaagacttctaatgtggttggttgcctttttttttttccttcctttcattttgtaaaaccttttttttttctagtttgttttattgcttttgtgacattggaatttgtggattttctctctctccccccatccctgccatcaccagaccctggggttcctctgatcgtgactctgtttatcccacactgttgcctgctcctctgaggaaaagtatattatttatatatatatatatatctatatataaattttgtttttaaggaggaaagagaaaaaaaaatctaaaaagtgctttaaaaatttgggagagggggctcgggggagaggacgaagacagaagttttgaatctccaaacgtgggggtctaggtggaccgggcgggggtgggggggcgccctgaggggtggtccctgggggtcccgccggttgtaagtgccgtgaaggaaggcggcaggagcacccccaggagccatcctggcgccccaccgggaaccccagtccgatctcctttctccaggcctagaaataaataggtttgtgtctcagtggccaggagacgtggggtgggcgacggggggaggccgcaggcagggttggaggcggggaggccactggggagatggagagggagacccctcccttagtaagtgccctgaggaaggagggtgcgggtcgggggacgggggcccattttaacgtccgctcagagcagacagaaatcatttaaggtcttgtctgaaagactcatagaaaccagcgaggggaggaaattaaaagcccaccccagtccccccccagcgcccccacgtctaccctccccccagcccagggcctcggatcgggccccaggccccatgccgggtgcccagggggctgtgcggggtctcggattccttgtgtcctacaaaaaaccccaaaccaagccccgaaacccagcgatggggtggtggggggaaggggagccagggagggccggggcccctgcggagggagaaaaacgtcagaaaggagggaaatctgagaaagcgctaccctagattctgtgacgcgtcatatatatatatctgtatatatatatatagatatagatatctgtatatagatagattttctttttttgtgtttttgggggggtggtgggtgattttttttctctctctctgtctctctctttctcgggtttctgttttctctttttggtttttaggcgagtccggctgtgaagttaccgtcggtggcggccccggggccacctccgctgtcacctcctccaccggcgcccgctacattcaaccggcccaagccgtcggggctggccacgtcctcgtcctcgtcctcgtccttaaagtgcttctcctggccgttgcgccgggcgtcgggggagctgggctgggcgggggcgccgggggtcgcggtggcccccgggctggggtcgggcgccccgccccggacgcggggcttgcggccgcggcgcgaggggacgccgttgcagccgtctttcttgaggtgtctgtgcaggtggtcggagcggacgaaggtcttgcagcagctgtcgcactggtaggggcgcaggcccgtgtgcacgcgcatgtggttcttcaggtcgtagttgtgggcaaaggcggcgccgcactgctggcacaggtacggcttctcgcccgtgtgcttccgcatgtgcaccttcagcttgtcctgcctgtggacggggcacggggcgggcacggtcagtggggccggggacccccgatccccgcccagggaccctcacggacacggcaggccctggatcatcacccttgcagaacacggaccgtgcaccagaggtttcggtgccccgatggggacggtccctcgaaaaacgagacgagtgggggcgatttcgcattctgaacatctaaagagggcctcggaccctgagtgctgtgtggccttgggaaaacgctatgcctctctgaaccccgtttcctttccttttttaactttttaagagacaaagtctaggccaggcgcggaggctcaggcctgaaatcccagcactttgggaggccgaggcgggcggatcacttgaggccaggagttcgagaccagcctgatcgacacggtgaaaccctgtctctactaaaaaaacaaaaaacaaaaaaacaaaaaacaaaaatcagccgggcatggtagcaggcgcccgtaatgccagctattaggaaggctgaggcaggaggatcacttgtatctgggaggtggaggttgcagtgaaactccgtctcaaaaaaaaaaatttcactttttaagagcgaaactccgtctcaaaaaacaaatctgccaggcgtggtggcgcaggcctataatcccagctacttgggaggtggaggttgcagtgagcccagatcacgccactgccctccaacctcggtgacagaatgagactgtctccaaaaaaaaaaaaaaagagaggcagggtctggctttgtcccccaggctggagggcagtggcgtgatcacggttccctgcagcctcgaactcctgggctcaagccatcgtcctgcctcatcctccagagtagcacacgcaccaccacaccctattaaatagctattaaactatatgtgtgtgtgtgtgtgtgtgtatatatatatatatatatatatatatatatatatatatatgtaagtttgagagatgggggttgagctacgttacccaggctaatctcaaactcctgggctcaagtgatcctcttgcctcggcctctcaaagctctaggattacaggtgtgagccactgcgcccgccatgaacccctttccctaccacagaaggagacagtgggcttctgccactccatcctgcccctacccctggggtaggatgaggccagccagtgcctggtgccttcattcatgccacagacctttgccgagcgcccgctgagggccaggccctgttccaggtgctgaaaataccgcaaggaacaagacaggcaaacatccctgccctctcgaggctggcggcggccgaggtgtttggtgacagatagggtgaccaactgttctggttttagcactgaaagtcctgcatcctgggaaacccctctgtccgggacaaagtggggcagttggtcaccctagtaaccaagtccccaccccacgacacccaggactgcccactctcccctcacttcagcgtcactcccctatctgggctccaccctgacgtgcaaaggtgcaaagcacaagctacgctggggcctttgcatgtgctgctcccgcagtccggggtactttcttttttcctcctggatcttcacagtcaaatttgggctcaaatgtcacctccttccccagccctgtctccatcctcctgtcatcaccacctgactcttctattgtttttttttctgagaccgagtctcgctctatcttccaggcttgagcgcagtggtgtggtctccgctcactgcaacttccgtctcccgggttcaagcaattcttctgcctcagcctcccaagtagctgggattacaggccctctgccaccacacctggctcatttttgtatttttagtagagacggggtttcaccatgttggccgggctggtctcggactcctgacctcaggtgatccacccgcctcggcctccccaaacgctgggattacaggcgtgcgccaccacacctggctgatttttgtatttttaatggagacagggttttcaccatgttggctgggctggtcttgaactcctgacctcaagtgatccgcctgcctcggcctcccaaagtgctgggattacaggcgtgagccaccgcgcccggccggtctctcttgtttctgttgatttccttgtttctcctctgtctccctgattggattgtgagccccgagaaggcaggggttgggtgtgacttgagggcccctccctgcctgtctcgccccatgggggcagcgtggacccagcttagcctggagcctctagcctacaaagccggtcaccatatcagtggggtgcctgtggcctaggtggctcctgaacccttggaatgtggccactctgaactgatgtgcgctggaagtgcaaaaggtaccccagcttttgaagacttgatatgcaaaaggtgatgtaaaatggctcaatgaggatcgtgcacattgactacacatggaaatgcatctactgggttaggtaaaatgtttcaagtcactttcaccaactctctttgactttttttgaacggggctgtcagaaaatgtaaaaatatgtaagtggcttgctggccgggcatggtggctcacacctgtaaccccagcgctttgggaggctaaggcgggcagatcacctgaggtcaggagttcgagaccagcctggccaacgtggtgaaaccccgtctctactaaaaatacaaaaattagccggcatggtggtgggcgcctataatcccagctacttgggaagctgaggcaggagaatcgcttgaacctgggaggtggaggttgcagtgagctgagatcgtgccactgcactccagcctgggcgacagagcaagactcgtctcaaaaaaaaaaaaaaaaaaaaaaaaaaaagtaggtgtcttgcctattcccattgagtgatgccaatctatagtaataaagtgtactccttcctgggatccggagggcaggagggagccctgggtctcaagagccctggctagaacctgacctactccttgctgctgcctgttgtgccccacatctgagccacctcgggtttcttccttctcacactcaatagactgaagacttctttagtgtggggactggcaaactcctactcatccctcaaagccctaccttgaatgcccctctacctttcctaattcccaaagacctggctcccctctgggttcctccagccctaagtccctccctctggcaccagctacagagctggtgtccctaactttaacccctccttggctctgttgccctgagggtcaaggcctggcccttggcaaccagacccctaccttatctctagccttgctgccccactgaagccaacagaacgtggtaacttgctaacagaaccctggcctaaccaggtctgttaccagcctccaggcctctggtttactgatcaccttctgcaaagcccacggcaaggtctccgggctgccttgcccagatctggcacagggccggggtcacagaggggatggcagccactaggtttttctagaaccgtgcagagactccccagatgagcctgggaggcccagagagaggaagggacttgcctggagctgcacagcaggccagagggccacgcagaggcggggtgggggcggaggtatccctagtttcatcaccccgagccccagcctgggtaattatagccccggccaccacaggccccacttactcaacgccctgctgtgactcagaggggcctcgggctcccaggcttttggagggtggaggtgctggtgtcctggggaggggggaccagagcacggggtgggggaaaagaggaagcaggtgggtctaaattggggtgggaggaagaggtctccacaattgtccctctctaagcctcagtttctctgactgaggggatcagccccgggtcgggtgggatagccagcagtgcccgagtcagaatgaaaccgggcctgtggcctgcggccagggaggcagggtgggggtcaccaccttcgctcagcctggtcccctctgcagaccccagttctctgcaccccaccaagctgctcttcctgagctcagagacgaacccacagtgacccctgcctggaggaagaggagccccccaagacctccagtaccccaacctcaccaaggagggacaaaccaccagctacactgcctgcctcccaaagtgccctttgccccctgcctggcactcctgggcgccggagtccaggccgcaccttcctctcctggcctgctggggagggggccggggtgctggggaggggtcagtcccagttcctgtccccacggggtggggttgggaagctgggacaatggcctctttcttcagcctcggtgggcgtggctgggggaaccccagggcgggcggggggcagggggtggtgctgagtcacccagcctggccaggtccctgcctgccagccccctgcccccaccgctacagcccgccccggatctacgaggcccagccagccacctctggactcctgagaccgaattgcaaactgcccgggcctggccttgaactcctgctgtttagggaccaagtcctgtggctcccaggggggcacagtgatctctcaagctgagctggcctcagggcctctgcactggctgttccctctgcctggaacgccctttcccacagctgctcctcccctccttcaggttccggcaaggcctgtccccggcgcctagaacaggcctggcaccagcagacgcttcataaatgttggctgattgaagcaaatgacccaggctcacgggaaactcagaagccgctccacggcctgggctgtccctccctaagcctgagggcctgtcaccctctcccaaagcagaaaaagaaaaaaatccaaaagtgcagaagagaagaaccagccctccaggaaggaagaacgactgtgccttcccgcccacctcccgcagctcaaccctgtccggcacgctttgcatatgatgtggctgtcatcttatgtctggcctgtgctgtcacccaccgggatgtccacccacaagggcagggcctggtctaggctgttcttaacagccacgtgggtcagggaagcgttcgttggctttgggcccaagaggtggggtgtgtctgtttgcgtgtgtgtgcatatatgtgtgtctgtgggtgcatgtttgcatgcatgtgcatgtatgtgtgcgcatgtacgtgtctgtgtgcatgtgcctgcatgcatgtctgggggtgcgtgtgcatctgtgtgcgtgcctgggtgtgcgtgtgtgcgtgcgtgcgtgcgtgcatgtgtatgtgatgtgtatgtggtgtgcgtgtgtgtgcgcgcatgtcggtgtgcgtgtgtgtgcgtgcatgtgtatgtgatgtgtatgtggtgtgcatctgtgtctgcatgtgtctgtgtagcatgtctgtatgtgtatgtggtgtgcgtgtgcgtgtgtgcgtctgtgtgtgtgcatgtgtacgtggcatacgcgtctgtgcatgtgtgtgcatgtgcgtatatatgtgcaagtgcgtgtatgtgtgtctgcgtgtgtgtggatgtgtaggtgacgtgcatgtgtctgtgcgtgtacgtgtctgtgtgcacgtgcgtgtatgtgtgcgtctgcgtgcatgtgtgcgtgcggtgcagggagagaggcgggaggggtcgtgagcggcggatgctggggcagagagcaggacggcgcctcccccgcggcgggcagctcacctggtgaagcggaccttgcagatgttgcactcgtagggcttctcgcccgtgtgggtgcggatgtgtcgcggcagcttgccggcgccctggatgaccttctcgcagatggggcacttctggaaggccttggctcggatcttcttctccaccttctgcgaccaggccgggtagacgtcgccgtcgtgggcgccgctgaagtacttcaggtagtagtccatgacgcccttgtcgtcggcccgcgactcctcgtcgctgtcccccgccgcggcccccgcccggcccaccgatgacatcatctgctgcagcagcgtgctggccgccagcccgtccacgtcgggcccgtccccgtcctcgccctcggccgctcccgacaggaagcccggagagtcgcccggctcgggggccgcctccgacagcgaggcggcctcctcctctccgccgcggccgtagtggccgttctgcgtggcggccggcggggccaccggcggcggaaagagacccccggtgggggcgtcctcatcccgctctggccacagacccgggttgctgtcgccctcgtccccgtcccccgtcgggggccgctcggccggggggcccggcccatagaagtctaagccgttgcagtcgcccgcggccacggcggccacagcggcggccacggcctccttggtggcatccaggtcatcatcggacgccccaaaggcggaccacgggaagctggcagcggcggcggcggccgcggggggcaggctgttcatggggttgctctggaagaactcgaggtactccttggcgcggaggaggttgcgctgatcaatttgatctacaaggtccagctgcccggcgtcggcgcccgcgtcggccgccaggatctgccggtccaggaggtcggcgcacacgtggctcacggcggggatctccagcaggcgggcggcgctgaggatgtcacccacgttggctgtgctgacggtgagcgtggccgtgtaggcgaagtccatgagcgcggtgagcgcctcggcgctgacgaagtcgatctcgtacacgttctgctggtccaccacggcgcccgacgtgaacagcttcttgaagtactggctgcaggcggccagcaccgagcggtgcgtggggaactcgcggccctccaccaggatcaccacgtcgcacagcaggccctgcgtccgctgctcgttcagcccactcaggatgtcgctgctgtggtcggggaacgggatcccgatggggccgtccacgccgccggccatcttccgcgccgagacctgcagcagtggggaaggagagggcgctcgtgagtgggggtgcgggggttcctgtgcccactgacaagggcccgaggcccttgagaagcagcgttccaccctgctcccccagcctcacattcccacctgcacgtgaaggcggtcagatgtcgcgcctttccagccccagcttccccagctgtgcaccaaagcgatacatgccctgcctccagcctcttttcttttttgtgtgtctttaatacagagacaggctatcaccatgttggccaggctggtctcaaacccctggcctcggcctggcgcggtggctcacgcctgtaatcccagcactttgggaggccgagacaggcagatcatgaggtcaggggatggagaccatcctggctaacacagtgaaaccccgtctctactaaaaaatacaaaaaattagccgggcgtgttggcgggggcctgtagttccagctactcgggaggctgaggcaggagaatggcatgaacccaggaggcagagcttgcagtgagctgagatcacgccactgcactccagcctgggcaacagagcaagactccatctcaaaaaaacaaaacaaatcaaaaaaccctggcctcaaatgatccaaccgcccctgcctcccaaggtgctaagattacaggcatgaaccacggcacccggccaagactgttttccatctgtgcatgaggatagccagatgtcccggctccccagcctcagtttccccagctgttcccaagtgcagtcaaatgtcctatcctctagcctcagtttccccagctgtgcatgagaatggtcagatgtcctgcctcccccagcctgtttccccagctgtacacaaaagcaatcagacgtcatgtccccagcctcagtttccccagctgtacaggaaggcaatcaggtgtcccactcccaacctgtttcccatctgtacacaagggcggccagctgtcctgcccccagcctcaatttccccagctgtgcatgaggacagtcaggtttcctgccccccatcagcctcagtttccctagctgtgcccaagagcagtcagatgccctgttctgtctcatcagcgtgagatgaggctggcaaaacccacactggacgcttaaatttcacaagcacactggcaccacccctccgaggagggcccccgggaatgcctgttgaaagggcactttgaggcccggctcggtgctcacgcctgtaattctagcattttggggaggctgaggtgggcagatcacttgaggtcaggagttcaagaccagcgaccagcctggccaacatggtgaaaccctgtctctactaaaaatacaaaaattaggctgggtgtggtggctcacacctgtaatcccagcactttgggaggccgaggcgggcagatcaccaggtcaggagatcgagaccatcctggctgacacagtgaaactctgtctctactaaaaatacaaaaatagatgggcgtgatggcacgtgcctgtaatcccagctactcgggaggctgaggcgggagaatcgcttgaacctggggggtggaggttgcagtgagccgagattgcaccactgcactcctgcctgggccacagagcgagactccgtcttaaaaaaaaaaatcagccaggcgtggtggcgcgtgcctgtaatcccagctactcaggacgctgaggcagaagaatcgcttgaacccgggaggcgaaggttgtggtgaacctggatggagccaccgtactccagcctgggcaacacagcgagactcggtctgaaaaaaaaaaaaaaagaaaaagaaaaagaaaaaaaaaaagggctgggcactgtggctcacatctataatcccagcactttgggaagccaaggcaggcggatcacctaaggtctggagttcaagaccagcctgaccaacatggtgaaatctcgtctctactaaaaatacaaaattagccaggtgtggtggcgcgtgcctgtaatcccagctactcgggaggctgaggcaggagaatcgcttgaacccgggaggcgggggttgcggtgagattgcgccattgtactccagcctgggcaacaagagcgaaactccgtgttggaaaaataaataaataaggaaagggcactctgaggcgctacaggaggacgcagtagctcgagagaagtgccctgatctgagccattttcctgttgatctgagcacgggcttcggccgatacagaggggaggccacgcagtgacctttacaaaacacctactatggccagacgcggtggctcacgccggtaatcccagcactttgagaggccaaggtgggtggatcatgaggtcaagagattgagaccatcctgggcaacatggtgaaaccccatttctaacaaaaaattagctgggcctggtggcgcgggcctatagtcccagctactcgggaggctgaggcaggagaatcacttgaaccaggaggtggaggctgcagtgagccacctagatcacgccacagcactccagtctggtgacagagcgagactcgtctccaaaaaaaaaaaaaaaaacaataacaacaacacataacacctacttcccgccagttccacccgaaccccaccggcagcacccactccgtcgtgagctgaggccacttgcccgaggccccaccatgaggacacagttgcgtccaaactcaaacccagagtggacctaagagccgaccccttggcctccccaaccctgactcctgcctcctggtcaggcctggttcttttcaggggggctctgagtcagcaggaaggggtgtggcagcccaggcacggggacccagtgccgaaacccagctgaggtcaaggccaccgtgggtgtgccccgtccggacagggccagtgactccgcaggctaaaccccttcctgcccctcagagcccccagcatagggctcagccctggctgtgagtaacagagaccgggctacagcccaggaggagcagggagccgggggaacccctgtccacctcctgcctgcccacaggactgcctggcagcccctccccaactctcagccaccccagctgagctgttcagccccagccaaggccttggccctctctgggcctcagtctccctatctgtcaaatgggcagaggtttcgggcagcgccgggccctggggggactgtgtctgtcccacccctttctccccctcccttttttccgccttcccctcggctgtgactcatccacccactcggagcttgtgcaaccctctggcccctgtccccacccctccgccctctcctgggagcccctggcggccccgagtcacccagcacagctcacattcctccaggccggccggtggctctcgggccagagcccctgggcaaggcccctggggagagggcctgagctgggcctttcatggcctcctccgggccaccagaccctcctgtcccccagcccagcagctcaggcaggctctgacgccgacgggcttgagccaggccccacaagggaggcatggtgtcggtccagccggacccaaagcccagggccctcagcgcggggcctgagctgccaggcgacacagaggcctttgtgagcttgctcagtgccaccacgctccccaggcccctccacccgccttccttccctccttccagcctcggcccagggcccagctgctcagcacccccgtctactctaaggcctgtggtggggcggtgggctcagatgtggctgctgggagcagggagggtaggaggggagcgaccccacccaaggctcggccctgggaagcctccgaggagtcccctttggtggtgtccaccccctgccaccatctgccgtctggccctgggccgcggggagcgtgtgagcagatggagctccggatcagacgggcccgggccctcctacccaccccagcatggggggagacctctgacccaggccaccaacgccccaagatggctatccctggcctgctgggccgttcctcccctcgggtgaccagggtccccgctctggagtggctgggaggtgtctttcctggggcctggaggatgggcccaaaataatccaggtggctcagcgacctcctgcaggtccccgccagtgtgaagatcccagttccaggttgggtccgggggtcccagtctctgccctctccagcctgggaccctctcttgggcccctgttcccccctaaatatcactgaggccctccctcaaagcagcgaggcccggggtgatgtcagccaaggaaagcccccgtgagaggactgtggccgcgttttacagatgagaatgccggggcccagagagggctgcagtcctggcctaaggatgcccggcagggctgactcccaggggctgggggccaggaaatgatggaggggccggtccccccacccacccagggcaaggccctgccctcgccctggaaactaaactcgctctgagacaactgacccacgccctcactccaggaacacaagccacctgccggccacgccctgcgccaatgcccccacctaggcctcctggaggcctcccctaaggaaagggccgaagaccctgcctccgaggtgggagaggggaggccgggcccagccagagcacccccggcgggggccacaaagtcttggcaataaaaagtccccgagtgctgaagccccactgtgcgcccgacacacggtacacgcctccggaggtggcggtttcgttcccctcctccaggaagccccggccccacgccagccaggtccccacccctgccggccagggtcccctgggctcggcccacacccacccggggccccatctttcatcacagctcctcccccgcgctggcctccgtgggatttccggggctgcttggtgctgactcggcggccgaggggcaggccctggcaggcccctcctgggctggaggtggggcgccctcctccccccgggccactcccaggcccctaagcccaaccctcccagggtggcgcatagtaggggcgcagcaaaccgccggataaaccagagacagcccacgccccggcccacccagctggctgccaggcatacccagaagcagggggctgtgcagcctgccggtcccacctcccatctaacctaagggtcacttgctgtagtgtttgtcgagagccacggcacccgggccgcatttcggccccctctgtgctcccaaactaactgggcaccttcacttcgtcttccccaggtccctgagaggctcagagaggtgaggcggcccagtcgaggtcacacagcagccctctgatctgggcagctgccacttcccagctgcgggggatgtgtcgtgagctcggaagcaccctgacgtggctcagggagcagcagatgtcgcctaggaaggaccccggcatcccaagaagggcaccccagcacggggagcatcaggaactgaggcctggaggtgggcgaccggggaagggggaccggcagagaggaggctgcatcgctagtgcagggtgtgggagccaggggcctccccaaggtcacacgacaaggtgagggctgggcaggtaactgccacccgccaccttcccgaaggtcacttcctggagcagggggccgtctaatgaggggatcagggcccccacccaaccctctgcccagggagagcagggaaggaggccaaagggacctctcacccctcatgtgctgtgcagagcagctcgggttcaagcctcggctcccccacctccaagctgtgtgaccttgggcaagatgcgagacctctctgagcctctgtctcctgggggatgggggtcgtaacagtggaaaggggccccccactgtggtcagggtcccgctcacatccattcagcaaacttagcccagggacctaatgtgcgccagagccagtccccaaaacacattgccaggctgttcaccacccctcacggatgggaactttgctcctgaatgctattccgggaattcagtcccctcctcacctaccaagggagtgagtggtggggcctgaggaggaagctggaaggggagatcaggcccagagagggtgggcggccggcccaaggtcacactgtaagcctggtgtgcaggtgcggctgccaggcccgcacccggcagcccccgccccctccccgcccagcggcctgtgttgcaaggttggtcccgacgggtaaccccgccctgacctggtgccaagccccgcctggcccagtcctcggcctgggtttaatgggacaggaatgcagtgtcccgatcggggggcaccaacggcctggggtggctgccagctgccagcccgccccctgcccgcctgccctcgcccgcaggcctccctctgggccagacatggagcaaacaggccctcggccattttacgtgtccatttattgccctaaatggggaggggcttcctgcctgggccttaaagggccagaggcaggaaggccgtggggacccagtgggaagtgtgacagcggggatgggggcagcgatgaggaggccagggggatcccatctgacgcccaactcatgggcgggactgaggcccaccctgttcccacactctgagatgtcatgggccaggaagcccagactacagcccgagcccaggttccaagaggaagcttcatgacgacagtggaggggctgagcttcccgtcactgggggcaagcaaggccagactctcggaagcccatccttgtccaccctgccatcagcccaggctgcacctgcttagctgagatgcctgtgagaggccgaggtgacctctctctccctcccctgagggaggcctgcttgtcacctggagatacctgccccacccccactctcgcctgagcaggtggaaggctcagcctgggagcctggcggcctgcagaatccggccagatccttctctcaggcatcctgataggtgggatgggccttgttttccagtcaaaccagaaaggcgtgggtggcgacacttccaccgagtggccgtccacagcctgctggggggacagatggaggggctggtcctttggccacgctcctcccgagcgccggattctctgaggggcgccttctgcgctttggggctctggactcggcgctcggggcccaagggccagagccgctcctcggagcagctgggggaggctgggccttgataatcgccccagagacccacggtacgtgacggcacccacagcgctggaaggcaggatctgtgtctgtgccccattttgcaaacggggaacgggatcagagagggggagcagcttggccagggtcgcgcagcagaactggaatttgagcacgggccgtctgtctggctctggcctgcctaactagtcctcccacggctccttccatcccctttcctggcccccggataccagcaggagatgaaatccccctaccctgggggctgagaggaaggacggcttatcctcataccctcagagctgccttgcaagggagctctcacacaggagcctggggcagggctggagtccagctgacatgggtggctcagggaggggcctctgcccctccagctctcaagacagctccgcaggggcctgacacagtgcacagtagtcgctcaacaagcattcccaatgagccgctgagcgaaccctcgagacaacactctagggctgatgaccatctccccactgtctggatgggaagactgaggctggcagagggggagtgactgctggggtggacccaagggctgggctaggactggaccatgctcacccccacccaaggctcacccccacccaagctcgttcctcttgtccttgttgcccagggctactgcagggcagtttatggtctggcaggtgacaggtgggggtgcaggtgtctcacgcagttctgacccacaccccacactcaggtctctgccatgccctgagctgacctgggagtttccgccgcggaggagaaaagacaccacgggtggctttgcaggcagcagctgggggaccctccacagccccaggaacacagcgcgccccggctgcaggggtcacggggctcatccaaggtcgcagagcaagcgtgccagcattccaacccttgaggagccctccttggagcatctgggctgcagtgggctggctctggggaggtgacctcggtctcctctggtcataaaacccagagccctgcccgcctctgaggaccaaggtgagacgagtttgtggctcggcaggattgcagaggggcctcgtatgcacgtgcgccagccagggcctgcccggtgaggcagggaggcgagagggctgtggctcgtgctgtgtgaccttgggagccatgctggccctctctgagcctcaatgtcatcttcggacacagggtttaataagcctcggtgacactccatttgcaggcaggtgcctgcagttgagcctctactgccaacctccggccctgcttaaagacaggtgggcaggcgcccctgggccaccacacagtgggaggggactttggacaggccccgagctggaaggatggagcacagggggcagctctgaccccacctgagtgaccttgggccgctctctgcttccccctacgcttcagtctcccctgcctagtaccggcacctgctccgaggcttgctctaacctccggagtttccaggctcacatttgacctcccctcccggccttggtttcctcctcatatggcaacggggatctgccaccaggtggacccagctataggtcagagggactcaaggaaagaaaaggaaaaaacaaacaaacaaacaaacacccagcagggatttgtgatcgccccaggaacctttccgaccaggccccaggctgggctctgcctcggccgcgcctcagtctcccgcacagagcaaaggacccatccactgcctgcggccgcccgcgggcctctgccgatgcgtggctgcccgcccgggcccaggtgctgactggccgccacgcagccaatcggaactgaataataaataccccccggactgacccacgaattaaaatttcagtgtcccggttggctcttctttccttccttagacttcgcttttccagcggccggctcctgcccccccttctcccccaagctctgtctccacagcgatggctggtggtaaacagaggccccggccccgccgataggtgctctcggggccccatggcgggtggccctcgcggacaaacgcccccggcctgaagccctcaggccctggcagcagcagggctgggcttaggcctggcctggcctgggcccctgccccagcctggcctccccgggacctctcccagaccagtttgccaataggaagtgatcggccggtggtggggaggcacccccagtgtgggagcggcacgctcagggttacgccctggtccagttctgaggttggggcggggggcactgacacggaatccccacgccctctccggaggcagctggcagggaggtgggggggcccaccgagcccgccacccatgggtgagccaggtgggtgccgcgggtggcaggggcaccagcacctctgtgacttccgccgcctgactggggggagaggagttgctgcctccccccgcctcgccgccaactcctggctgcattccgccaacatttagtgggcgccgactgggtgtccgggcccgggtggacagcaacctcccgccgcggcccaccgtgcgcccccgccagccagcccgggcagcgcctcccagaacccgcagaggcccggtccctgggggggcacccgctcctccgctccgctcagcccccagccaggctcccaggccgggggggctgggtctcccgcccgggaggtagggagcgggagggagggggctggatcccaccagctcccccctcccctgcccgggctcaggcttcgcacgtggtggtggcgtcaagggaaaggagggggggtccgggccagaggagacggggtcacgcgctttgggggcgcggacggcggggactggggtgctctctccgccccctcccgcgggtcggagccggacggccgtccgggcagggcgaggggccaggccaggccccccacccggggctgagtcaggcccgggcgggggcaggaagcggccccctcccccgccccggccgcagcgcgcggcccccgcccggcccgcggtcccccgccgcctcgcccgcgcggggggctcctacctccttcccggggcagcggcgagggggcccggccccggcggcggcggtggcggcggctgcggctgggctggctccctccgaggggccgggaggcggcagtgagcctggccccgcgccaccccccgccgccggcggccaatccccacccgggctggggggagggcgatgcaaattaccccggatctgggtccgcccgcccgcctcccccacgcccgggcccggcctgcgctaggccgcgcatccccgggctcgcctgcaccgcgcggccgcccgggccgccgccctccccggggagcgcggggagggtgaccccccccccacgggcggggggccgaggggaggggggctggggacggttacacaaccaggcggggaggggccccggggcggggagggggccggcccgcgggccgcgcagccggaagccgggaccgccaccggcccccggcgaggggagcccggctccaggccccgccccctggcgggctggccccgcccccgcgccgcgccgcgcgatcggcccgcgcccattggctctccggcccgccgctcaccgcccctcctccgcaccgcccctacccgcaggccgcggcgggctgtcggcgcggggcaccctgggacttgtagtccaagccgcttgccacctgccggctgcaaacggcggagggactacgaagcccagaggtccctgcggccctgcccgcccacccggacaccccaccccttccccctcctttccgaagcccccctccctgttttttcagccccctcccccccatcccccatggagctcaatcctggccaactccaacgtatgcacgcagcaccgaataggcccccggggggcgagagcgcccctcgtcttcagctggaaacttagcaggcgacgcgcccccctatctccccacgccggctccccccaccctcaatgcagccctgcttcccctcccccgctccccgcgcgcctgggagccccgaaaagccatgcacccgggttggggggggctggcgcacaagctcatgcacttagcccccaatccccccttcccgggcggcgccccctccccgcgctcgggatccagggcgcctccagcctccgggcagctgccaaccaccccttcctctgaaacttgggggaacgtccccggctccccggatctccccttcccgagggggcagcggtggccgcagcgacccccgcccgtccccgccctgcaccccgtgccgggggccgcgccgggcgctgacttacctcgcggggccgggccggggcgcgcggggccggggcccgaagttgggactgggctccctcggccgctcgcctccggggtccgcggcgctcgctctgcccgcgtcgcgctgccctggtcgctccctcgcgcggcggcggcggcgtcactgcccctacagtaactgtacagtacagccaaagccccgtatgatgctcgcgactcccttcctggtttctccgagggcaagaggggtcctcccttgtcttaaaggtgccgcagccgccggcccccccacgcccagcccgccccccccagcctggcctcggaggccagaacaggctcggcaggtcccctcttgccacgtctctgccctcccgtggggcttcgcccgctgcgccggggagaccgggctgttattaggttttgtcaagtcgggggggggggtccggcccgccccggcgcgcccccccgcctctgacctctccgccccgccgcgcggcgccgtgccagcttgccagcttatctggccccagagctccccggggcgcggggggagcgggccccccggggtggagggggggtgggggcctccagataaacaggcccccagcctctgcgcaggggcggggtgcgggggggcgcgggctgtgcccccgacgcccggggcgtggcaggatggcagcgggggcggggagcgcggtgcgcacagcgaggagcgacgcgggcgtgtgggtcgcgcggcctgggctgccgggggtgggttgggggtgaggcggtggggatccccccgcaaggccaggccctgggcctccccgggcctcagtgggacttgccgcgccagggaccccggggggtggccttgccaaggacagcccgggtccgcggggctcccgggtccctaaatgaaaccaccaacctgccctcccgcgattatataaaggagtcgcctccaccccgctgcgctaggggcgtcagcgggggaaggggttggcgaggggcggggagggcggttgttttcccggcttcgcgagttcccccacccggctgcgggccgcggggcgggacggggaccgggccctggacgcctggtccgcgcgggccgctccttggcacaagggggtctgcatggctcgcgaggggcggaggtggggagtggggaggcgttggttcagcgcgacttttttttttcccctgtccgtttctcccacttcctccccggtcgtgggagaggtccggcgggggacagggaagggggagcagggcacgagtggtgagaacgtcctggcccggcccggggagggctggctggtgcgaccgcgcgcctgggggggggggggagggctccaggactcagtttccccttcctcattcctccagacagagagagtactgacagctgctttagctgccgtttagtgagcgcttatccagtgggtgaccctgttccggggctcactgtgccttcattctaacacctaatcccagggtcattattatgttttattattatctggcattcttagtaccaacaccacctgacagcgggaaccaccaccggcctgggtgtagtgtacccagcctgtcctctgacttcaaagcctctcctgcgagagacacagtttatggcttcttcgcacaatttattaaaagcgcctttcaacacccaaacgggttggattggcttttgtaataataatctggctacgaggggaaacccgggagggccccccggaggggaagtggactgtctcaggactcgcagcctgaaaccagccgggtaggtgggaagggacccagggaggggccgcgtggatctagggcgagggtgtcatccagggactttgctccaaggaccctgcctgggatagaaatccttcttccttcaaccaccggccatcagcctcgggaccaggaggccacgctgaagcacgattcttcccagatcccactgttgtgtttggatttctgcaaatgatgcccagacgtttttttttgttttgtttttttgttttttgttttagacagacttgctctgtcgcccagcctggagtgcaatggcacgatcttggcttactgcaatctccgcctcccgggttcaagcgattcccctgcctcagcctcctgagtagctgggattacaggcacctgccaccacgcccggctaatttttttttttttttttgtatttttagtagatacagagttttgccatgttggcaagcctggtctcaaactcttgacttcaggtgatccaaccaccttggcctcccaaagggctgggattacaggcgtgagccaccgtggctggccttggttttttttgtttgtttgttttgttttttgtttttttaatagagatttggtggggccgtgggggggtcttgctatgtttcccaggtctcaaactcctgggcttcagtgttcctcccacctgagcctcccacagtgctgagatgacaggaatgaaccatcgtgccagcgagacgcccaggctctaagctctacatggtctaacttcccccacaccaggagcagcaggtgactcagtttcccctcttgtaccaccagcctcagatccgatcctgcaggaaaaggatcgagaaagccccactcggattctccatggtgagaacctgactcagaggggcaggggctcctctgtgagacgggcatggaccctaatcctcatcgcagccctgagaagaagcagagactacaatttccaccatacagttggggaaactgaggcccagagatggacaaggagcaaggatgttaagtccagcattcgcgtgtctctggacgctgccagggggaccaaagggaggtccttcaggaagtgccaggatgtggcacaccccaaaccacgccccccgcccctgtcatgaaaacagaacgaaggggacccaaagcttcctcctgacctctgcccttcacttcctttttcctcccccaaccaaaaaaaaaaaaaaaaaaaaaaaacccgagttgatactattgaaaacctaataaagtataaaagattgggttgctgtgtgatcttgggcaggttgcttaacctctctgatcctcagactcctttggagagaagaatcgatgcaacttcctagtgttgtgacaagggagaaatgagacggtgcatggaacgctgagacagcacaacccctgcaccagggaggtcttcattacatgataggtgtgattatattattaatgtttgagtcacgcctattatttttgtctctgtgtagccaggggttttctgtttgtctgtttgtttgtttgtttatttgtttgtgagacagaggttcactcttattgcccaggctggagtgtaatggcacgatctcggctcaccacaacctctgcctctcaggttcaagcgattttcctgcctcaacctcccaagtagctgggattacaggcatacgccaccacatccggctaattttttttttttttttttttgagacaagtctcacactattgcccaggctggagtgcaatggcacgatctcggctcactgcaacctccgcctccctggttcaagcgattctcctgcctcagcctcctgagtagctgggattacagccgcgcaccaccatgcccagctaattttgcgtttttatagagatggggtttcactatgtgggcaaggctagtctcaaactcctgacctcatgatccgcccgcctcggcctcccaaagtgctgggattacaggcataagccaccgtgcccggcctctaattttgtatttttagtagagacggggtttctccatgttattcaggctggtcttgaactcccgacctcagatgatccgcccacctcggcctcccaaagtgctgggattacaggcgtgagccaccgggcccggccgtagccagggttattatccttggtggatagatgtagacaggggaccagggaggaggagtaacttagcaaagacacaaagggagtggctggggggacttgagtttcagttacgttgactagactgtgctgtgaagtcatgtaatattttattttatttttatttatttatttattttgatacggagtctccctctgttgcccaggctggagtgcagtgccgcgatctcagctcactgcaaccttcacctcccgggttcaagcaattcttgtgcctcagcctcccaagtagctgggactacaggtgcacgccaccatgcacagctaatttttgtatttttactggagatggagtttcaccatattggccaagctggtctcaaatccctgaccttgtgatccacccaccttggcctcccaaattgctgggattacaggcatgagccaccgcgcctggccccatctccattttttaaaaataaatgaataataataataatgaaatagaatgtttattttattttattttatttttttgaggtggagtctcgctctgtcgcccaggctggagtgcagtggcgcgatctcggctcactgcaagctccgcctccagggttcacgccattctcctgcctcagcctcccgtgtagctgggactacaggcatccgccaccacgcccggctaattttttttgtatttttagtagagacggggtttcactgtgttagccaggatggtctcgatctcctgacctcgtgatccacccacctcggcctcccaaagtgctgggattacaggcgtgagccatcgcgcccggccgaaatagaatgtttataacagcataattcacaacagccaaaaggtggaaacaattccagtgtccattgctattattcttttctttctttctttttttttttttttgagacagagtctcctgtgtcacccaggctgaagtgcagtggcacaatctcagctcactgcaacctccatctcccaggttcaagcgattctcctgcctcagcctcccaagtggctgggattacaggcacctgccaccatgcctggctaatttttgtatttttagtacagaagaggtttcaccatgttggccaggctggtctcaaactcctgacctcaggtgatccacccatctcagcttccctaagtgctaggactacaggcatgagccactgcgcccagcttccattattagatcaatggataaacacagcataggacatccacacagcggaatatgactcagccatgaagaggagcaaagctctgatgcaggccacagtgtggatgcaccttgaggacatcatactcagtgagagaagcaagacacaaaagtccaaactgtgtgatcccatttctctgaaatgtgctgaacaggccaatccatggagatacaaagtggatgcgtggttgtcagaggctggggaggggaatgggggtgactgctattggacatgaggtttattttggtgatgatgagaatgttctgaagttatatagaagtaatggttccataactctttcaatattctagaaacaactgtgctttttatttttcatttttatttttatttattttctttctgacggagtctcgcactgttgcctgggctggagtgcaatggcacgatcttggctcaccgcaacctccgcctcccgggttcaagcaattctcctgcctcagcgtcctgagtagctgggattacgggtgcccgccacaacgtcccactaattttttgtatttttagtagagacgagatttcactatattggccagactggtctcgaactcttgaccttgggaaccgcccacctcggcttcccaaagtgctgggattacaggcgtgagccaccgtgcccggccttgtgctttatttatttatttatttatttagagacagagtatgactctgtctcccaggctggagtgcagtggcgcaatcttggctcactgcaacctctgcctcccaggttcaagcaattctgcctcagcctcccaagtagctgggactacaggcacacaccatcatgcccggctaatttttgtatttttagtagagatgaggtattaccatgttggtcaggctggtcttgaacttctgaccttgtgatccatccgccttggccttccaaagtgctaggattacaagtgtgagctgccgcgcctgacctattatttacttatttatttagagacagagttttgattttgtcacccaggctagagtacaatggcgcgatcttggctcaccgcaacctccacctcccgggttcaagccattctcctgcctcaacctccgagtagctgggattacaggcacccaccactacaccgggctcattttgtatttttagtagagacggggtttctccctgttggtcaggctagtctcgaacttctgaccacagatgttccacctacctcagcctctcaaagtgctgggattacaggcgtgagccaccgtgcccgacctaattacttttctttttattttgtagatagagacagagtctggctatgttgcctaggctggtctcaaactcctgggctcaagtgatccaccagccttggcctcccaatgtgctgggattgtaggcatgagccaccgtgcccggccatgccttcctgtctcatttattcactggacaaaaatggaccatgtgctttccatgggccaagtccctgctctccagcgtacaggctagaggaggctaaagatagtaagaaagaagacaaatgaatacaaggattccagacatcatgagtgcaatgagaaaagcaagccataggaatggaaataccaggaccagtcctggagaattgttttttgtttgtttgtttgtttttgagacggagtctcgctctgtcgcccagcctggagtgcaatggtgcaaccttatctcagctcactgcaacctccacctcccgggttcaagtgattctcctgtctcagcctctgagtagctgggattacaggtgcatgccaccacccccagcaaatttttgtatttttcgtagagacggggtttcaccatgttggccatgctggtctcgaacttttgacctcaggtgatccactgccttggcctcccagagtgctgggattacaagcgtgagccaccatacctagccagggaatttcttttttttttttttttgcataattaggaaccaagcgcagtggtgcatgcctatagtcccagctatgtgggaggctgaggcaggaggatcacttgagcccaggaattggtggctgcagtgagctatgattgtgtccgtcagtatcctctgcactccagcctgggcaacagagcaagactccatctctaaaatttaaaataataataataggccgggcatgctggctcccacctgtaatcccagcattttgggaggctgaggcgggtggatcacctgaggtcaggagtttgagaccagcctgaccaacatggtgaaaccccatttctactaaaaacacaaaattagccgaacgtggtggcgcacgcctgtaatcccagctactcaggaggctggggcaggagaatcacttgaacccgggaggtggtgagccatgatcgtgccattgcactccagcctgggcaacaagagcaaaactctgtctcaaaaaaaaaaaaaaaaaaaaaaaagggccgggcacggtggctcaagcctgtaatcccagcactttgggaggccgaggcgggtggatcacgaggtcaggagatcgagaccatcctggctaacacggtgaaaccccgtctctactaaatatacaaaaaattagctacacatagtggtgggtgcctgtagtcccagctactcaggaggctgaggcaggagaatggtgtgaacccagggggcggagcttgcagtaagccaagatcaccccaccgcactccagcctgggcgacagagcgagactccgtctcaaaaaaaagaaatgctagaatggatctacaaatagaaggaagacgacgtgacgatacacaatgaatttgttttcttgtggacaggaatcgttgcaattattatcagttttctacaacttacggggttgtgaaataactcaaagatagcaaaagacacagagatcccacagaatcagacaaaaccgacttgtgcctagaggctatttcattttttaaatagtcctgaagggcctacacggtggctcacgtctgtaatcccagcatcttgggaggccaaagctaaaggatcgcttgagcccaggaggtcaagatcagcctgggcaacatagtgagaccctgtctctaccaaaaaaaaaaaaaaagatcatgaagatgatttcttcaaaggaagtgatgtttgagcagagatcttttctctcctttctttctttctttctttctttctttctttctttctttctttctttctttctttctttctttctttctttcttttattttggagacagagtcttgctctgtcaccaggctggagggcagtggcacgatctcagctcactccaacctccgcctcctgggttcaagagattctcttgcctcagcctcccgagtagctgggattgcaggctcctgccaccacgcctggctactctttgtatttttagtagagacagggtttcaccatgttggtcaggctggtctcgaactcctgacctcatgtgatccacccatgttggcctcccaaagtgctaggattacaggggtgagccactgcgcccggccatgagcagacatcttaatgaagatagaattagctgaagacctccgtatgtttcctaggtgagaggaacagccaaggtgcccagagtggctgcagttgggagccagagggcacccagtggggacttgtggccgtggtgcaggctgtggactttatttaaagtgttctgaattcagccatgaaaaggaaggaggctctgactcaggccaccgcgtggatgaaccctgaggacctcacactcagtgagggaagtcagacacaaaaagccacacagcgtgtgatcccatttctatgaaatgtccaggacaggccaagccacagaggcaggaaggggatgcgtgggtgccggggtcgggaggggcatgggtagtgactgccgatggggatggggcttcctttctggggtgataggttctgcaactagatagtggtgatagttgcacaagtctgtgaatgtattgagaatgactgaatcgcaccctttaaaaagggcaggctcaaggctgggcgcggtggctcacgcctgtaatcccagcactttgggaggctgaggcgggcggatcatgaggtcaggagttcgagatcagcctgaccaacatcatgaaaccccatctctactaaaaatacaaaaaaaaaattagccgggtgtggtgacgtgggcctgtaatcccagctactcaggaggctgaggcaggagaatggcttgaacctgggaggcggaggttgcagtgagccgagattgcgccactgcactccagcctgggcaacagagtgagactctgtctcaaaaaaaaaaaaaaaaaaaaaggacaaactcatgcctggaaccccagcactttgggaagccgaggcggctggatcacctgaggtcagaagttcaagaccagcctggccaacatgacgacacccatctccactaaaaatacaaaattagccgggcatggtggctcatgcctggaatcccagcactttgggaagtcgaggcagccagatcacctgacgtcaggagttcaagaccagcctgaccaacatgacgacaccccatctccactaaaaatacaaaaatcagccaggcatggtggtgggtgcctgtaatcccagctacttgggaggctgaggcaggagaatcacttgaacctgggaggcagaggttggagtgagccaagatcgtgccattgcactccagcctgggcaacaagagcaaaactctgtttcaaaaaaataataaataaataaataaataaataaataataaaaggtacatattctggtatgtgaattatatctcaatttatttatttatttattattttattttttgagactgagtctcattctgtcacccaggctggagtgcagtggtgtgatctcggctcactgcaacctccacctcccgggttcaggtgattctcctgcctcagcctcctgagtaactggcattacaggtgtgtgccaccacacctggctaacttttgtatttttactacagatgtggtcttaccgtgttgaccatactggtttcgaactcctgagctcaggtgatccacccgcttcggcctcccaaagtgctgagatcacaggcgtgagccaccgtgcccggcctgggagaaatactttctgagctgctgatttctccatggcttctgaattcatagcggttggggagatggtgcctgggtattttcacctgggcagctgctaagaggtgacttctatttgttccagaagacagaagccttggtagctatgctgggactggatccgtgtccaccacaccactcagaattcccatctgcaatgggtcccttctgccccgtttttaccaagcccagttccctctctgcaactgagaggcagcctcttgccccaccccctctcttccagactggatggctgcctcccaggcacctctcaggacctggccacagagctccaaagcccagggcctgctgccttttgggtcatggctcagggcccagtctctacctctctctgtggcccagtaccctttagctcaggaggtctcatctggagtgactctgcctccttccaggcgatactgggtgatatctggagacatttttaggtgttgtgattggggagggggtgggtggaggccagggacacagctcagcaccctgcagtgcccaggacggacccaccccagaggttgatcaggtcccatagtgtccaccacaccgaggggctgaaattctagcctgggtctaacttcagtcttgctcgctgtagaaggcacccacacacttctctcctctctgtgctctgcagagaagaaaagccactggccagtgacccctggacaaggcaggacttcagccatccactgccctccaccaccacccctgggcacccccttgtccaaagcagacagtctctactctgggataagggggggaccctggccccaggctttacccactttggggtgattcctggaccctggagatggaccccaagggtcaccctcaccccacgggacctcccaacaatggacaaggccagtctgtcctctcccccagcccccagttgtgcagaatcctcaacatggcacccccagtgtggagctgaagactccagacttcaggggtgggggcggggctgtgggaggggagatcatggctgcggttctggtccagccagacctcctgggtttgttctttttttaagaaccaccgcaatttaaagagcggagtcctccctccctgcagcccacctgccacgtgggctggcccctgttcccctctccttctctccgtctctgcctgccgggcttgggctgcgggggccggagcttccgtttcactttggtatcaccggtttcactttcagggctggggacagagagaggagaagagggacagagagatggacagagccggggagggtggccttgttaagtcgggggccggggaggggtccaccacctgccgctccttttcctgaccttcctgaccttcttctggcctggccggggcgggggggggggggggggtcctggaagtcaaggtcatggggtcaaggtcaagttctccctgtgtgaccttgggtgggagaagcaacttcccactatccctgagcctcctttcctgaacccctcagttacccaaaagtggggctaagaatcacgtacaccccacccggcgctgggaagttcaaagattcctccagcaccgcggaccatcccataatgtccccgtgggagggggcggggccaactcccaggcagaacaggatgtcggccgctcctttggccagggagagacccttggcccagaaaccaccgggaaggaggctccgggctgcccgagtcccgagcccgggatgagccactgtcccccagaacccccagcggaggctggagctctgtccgctagcagatccaggctggaaattcagttgggcatggccttgtcccaccccacctccatccccaccccaccctcaggtccttcctgcttggtgggggcctggggcttgagccactcactcaagagcagggactgggacccactgacctccctgtccccagcacccccacagggcccagtcaaggtggggcaggtgcttggtgctggtcagacaggataggggagtgaccatttgcatgtcaatatcaataacatatctcggtagagataggcggttagtctgtgtcaaaatgtgagagggcggtagttttctttttttttttttttaacagctttattgagatataattcacatgccatgcaattcacccatttagagtatagagttcagtggttttttgtttttcttttttctttttttggagacacagtctcactctggagtacagcagagcagtctcggctcactgcagcctccacctcccaggttcaactgattctcgtgtctcagcctccagagtagctgggactacaggcgcccaccaccatgcccggctaatttttgcattttagtagagacagtgtttcaccatgttgcccaggctggtcttgaactcctgcgttcaggcagtctgcccgcctcggcctcccaaagtgctgggattacaggcatgagtcacctcacccagcctcagtggtttttagtatagtcacttggctgggctggatggctcacacctataattgcagcaccttaggaggcgaagaggggcagatcacttgaggtcaggagttcaagaccagcctggccaacgtggtgaaactccgtctctactaaaaatataaaacttagccaggcatggtggcttgcacctgtaatcccagctactctggaggctgaggtgggagaattgcttgaatccgggaggcagaggttgcagtgagccaagatcgtgccactgcactccagcctgggcaagagagccagactccatctcaaaatataaacattaaaaattaagaaaaataaaaattagcctcttcattgtaaaacgggaataataaaaagagagaaaataaataaataaatattaaccagccgtggtggcaggcgcctgtaattccagctagttgggaggctgaggcaggagaatcacttgaatctgggaagtggaggttgcagtgagctgagatcacaccactgcactccagcctgggcaacagactgagaccccgtctaaaataataataataataataaaaaaatggatagaaaggcagcaccagctggctgaggtgctgaggggatccacctgggctggcagctctgtgctcctggaaaagccccttctccaccccacacagggcaggaacccaggacttccaaacaggaggcttagggaggctgctggaaccttagaaacccacattagcagtccagtgcagtggctcacacctgtcatcccagcaatttgggaggccgaggcaggtggatcatgaggtcaggagttcaagactagcctggccaacatggtgcaaccccagctctactgaaaatacaaaaattagccgggcgtggtggcaggcgcctgtagtcccagctactcgggaggctgaggcaggagaatggcgtgaaaccgggaggcggagcttgcagcgagccgagattgcgccactgcactccagcctgggcaacagagactcttgtctcaaaaacaaaaaataaataaataaaaagggaaacccacgttagcatttacaggtggcgccctgcggaggcccagagaggtacagagacaagtgggctgggtacacaatggcccctcccctttaatgatggggagagggggcatggcgcggtgactgacacttgtaaccccagcactttgggagaccgaggcaggaggatggaggataccttgagcccaggacttggagaccagcctggccacatgacgaaaccctgactctacaaaaaaaaaaaaaaaactagtcaggcatggtggtgtgtgcctgtcatcccagctactcaggaggctgagacaggaggttcacctgagcaggaggctgcagtgagaggtgatcgtgccgccactgccctccagcctgggtgacagagtgagatcctgtctcaaaaaaacaaacaaacaaattatggggagagaaggggaaagggagaggggatggggaggggaaaggagggaggaggtggagggagagagggaggggtggggaggggaagggggagggggaagagaggaggaggagaagggggaggggatggggagggcaggaggaaaggagagggggaggggaagaggtgggagggaaagagtagggaggggaagacagggaggggagatgaagggaaggggagggagagagggaggggtggggacgggaaggggaaagggaaaagaggggaggagggggccgggcatggtggctcacgcctgtaatcccagcactttgggaggctgaggcaggcagatcacaaggtcaggagatcgagaccatcctggctaacacagtgaaaccccgtctctactaaaagtacaaaagttagctgggcgtggtggtgcgcacctgtaatcccagctactcgggaggctgaggcggaagaatcgcttgaacctgggaggtggaggttttagtgagctgagattgtgccactgcactccagcctgggtgacaaagctagactctgtctcagaaaaaaaaaaaaaaaaaaaggtatggggagtgtagagtggatacctgcaagtgtcagctaggactccagtctaatctcccttgcagggttccacattcaggatctcctctttcctcagcccacctggctctggcactaggatcttatgaaatcccagggagctccctcctgtgtctgtgatcattgctcctcctcccttctccttgatgctcctcctcccttctccctcctcctagatgctcctcctcctccctcccgcctccttcttgcccctcctccctcctcctccctgcccctcctccctcctccctgctcttccttcctccctcctactcccccctcctcctccttgcctctcctccctcctccctgctcttctctgctcctccttcctccctcctactcccccttctcctctttgcctctcctccctcctcctttcctctcctccctcctcccccctgctcctccttcctccctcctactcctccctcctcctctttgcctctgctccctcctccctgcccctcctccctgctcttccttcctccctcctcctccttcttgctccttcttcctccctactcacccctgctcctcctctctcctcttccctactcctcctccctccccctactcttccctgttcctcctccttcctcctctctgcccctcctccctcctcctccatgcccctcctccctccttcctcctccaagagcccagggagcccagtgtccgtggggacagagctgcaaaggcctgacaggaagggtctcccgaggcctgagaaacggtgtgagcttggtattccgggaggaagggggacccaggacagccactcagggcccagcctttgtctctgcacagagctcaaactggcttgagggaggaagggaaggcgacctggacggcggtgttcctgggagtgcgagttccagatagttctagatactgacggaagttgcggcaacatctgcatttgaacctgccactgctccaggcctggtgacctccagcctttaacctttgtgtgcagtgagccttactccaagaggcaaccagccaccagccaccagccacactcagggggcccagtagggaccccgtgccttggagggccctcagtgccatcttggcagcgatgccacagctcaggaggttgtgccaggggctttcaaagctgccccccttggccaggagcagtggctcacgccagtaatcccagcactttgggaggccgaggcgggcggatcacgaggtcaggagatcgagaccatcctggctaacacggtgaaaacccgtctctactaaaaaatacaaaaaaattagccgggtgtggcggcaggcacttgtagtcccacctactggggaggctgaggcaggagattggcatgaacctgggaggcagagcttgcagtgagccgagattgcgccactgcactccagcctgggtgacagagcgagactccatctcaaaaaaaaaaaaaaaaaaaaaaaaaagctgcccccctttcttgcctggagggaggaagggatctcagcttcatggccatattttgaacctcgttgctcccagcccgcgcccccagccaggctgggcctctccaagggcccctgtcacccagtcctgccacccagcctttgctgacaccgttgcccatgttggccccgccactgttgggaatgtcctctccagccctcagctgtggattcccctccttcccaggacttctcctctaggtgctggctaaatttgcctttagcccttagggcggctataaattctaatttctgggcccgagcgagcgccgtggggaggctgcaggctccccagcgatggacaggggctcttatcttttaggatcccacagagcactgcagaaaagccccaaatatttgtgggtcacgaaggcagtgtcctgtcaggggagacagcaggatggtgggaccacaggatcgtccatgtcttccctgggggaggttcgagtcaccttcagaaggtcacctaacttgcagggactccgctgccgcagaggttgtgtggggagaggcaaacctggtcagcctattttgtggggtgcaaacagaagggatgtgggcctcctcggaagtctgcagagaggattcgctcctccgtggacgcttctctcttttcttgagcctgtgatgagttcctttgcaaatagggaaactgaggctctcagaggggattctatcttccccaaggtcacaggcccaaggacagcagaaatatcgtcaggcctgtggtcctgatgttcaaacaggaggccctggctggccgcagcgactcacgcctataatcccagcacactgggatcagaaggattgcttggggccaggagttccaggagtttcaggccagcctgggcaatacggtgagaccccatctctacgagaaagtttcaaaaaatgagctgggcatggtggcgcgcgcctgcagtcccagttactcaggaggctgaggcaggaggatcgctggaacctgggaggcggaggctgaagtgagctatgatggcgcgccactgccctccagcctgggcaacagagtgagaccctgcctcaaacaaaaacgtaaacaaaacaggaggccctgctctcctgaggggctggtggtgagtcactggtagatgggagagagctggggtcagggtcccagctgggggggtgggtcctcacctgtgctaccctccagggggcctctctccaggcctctgtccctcccctgggaagcctggcagaaacctgagactgggcctccagttccaggtcgccactgggcccaggcctctcctgtccgcctgccagggactgcggaacaggtaactcctgcgccaccctaaacccacctggcctgttgctccaggtgcggcctggaggccccggggcctgcacacctggtcagctcagaggccaggaagaggagcggagggaggggtggggccgccggccgctgctggtttcgttttgagccgggccccttcttcctccctccctcccactcctcgccagacccctgcattctgggaaaggctgtgacaacttcctctgaactctccttaacctgccctggagcccagggcctccaggaggctgagttccgcctgcgggacctgaggcttcctgcaggtcacacacctccacccctggccacgtggccctagaccgcccaccttctagaagcttctttatgtgctgccccatcatgtccccaccccgggtgcagctgtcccctgcctgcaccccctccaccctgtgtcccagactctgcacacaggaaaccgccctggccccagggagggctgcctgagacccccgcctccaacctgcactggggacatctgggctggatggtcctcgggaggtggggctgccttgggcactgcagggtgctgggtgacatctctggcctccatccattccatggcaggggcaccccctgtctcgacaaccacagacgtctgggagtttccaagcctcccctgggtggggggacagaattgttcctgctaagatccagtggattaaaagacatctgtgaggggacagaaatgactgagttttgtgccggccggtcaggcagtccctggcagacaaaattcccaagtatttgcatccaaaaaaacaaaacaaaacaaaacaaaacaaaaccacccagcgtggtggctcacacctgtcatcctagcactttgggaggccaaggcggtcagatcattgaagtcaggggttcgagaccagcctggccaacatggtgaaaccctgtctctactaaaaatacaaaaattagccgggtgtggtggcacatgcctgtaatcccagctactcgggagactgaggcaggagaatcgcttgaacccgggaggtggaggttgtggtgagccgagatcacgccactgcactccagcctgggcagcaaagcgagactccatctcaaaaaaaaaaaaaaaaagagagaaaaacctaaatatttcatattgattccaaggtgaaacgggaatattttggctctgctgggtgaaatatactatcaaatcatctgttcttttcctctattttgtttattaatatttatttatttatttatttattgagatggagtctgtctccctctgttgccaggctggaatgcaggggcgcggggtggaacaggtaactcctgcgcccctgcctcagcctcccaagtagttgggattacaggtgcccacaaccatgcccagctaatttttgtattttttgtagagatgggctttcatcatgttggccaggctggtcttgaactcttaacctcaggtgatcacccaccttggcctcccaaagtgctgggattacaggcatgagcccctgcaccagaacggtatttattttttttgagacagagtctcgctctgtcacccaggctggagggcagtggcatgatattggctcactgcagcctccgtctcctgggtttaagtgaacaggccggctaatttttgtttgtttgtttgttttgagacagagtgttgctctgtcgcccaagctggagggcagtggcacgatcttggctcactgcagccttcctctcctgggtttaagtgaacacgctggctaatttatgtttgcttgagatggagtctcgctctgttgcccaggctggagtgcagtggcatgatctcagctcactgcaagctccacctcccaggttcaagggattctcctgcctcagcctccctagtagctgggattacaggcgcccgccaccatgcctggctaatttttgtatttttagtagagatgggatttcaccatgttgcccaggctggtctcgaactcctgacctcaagtgatcctcccgccttggcctcccaatgtgctgggattataggcgtgggccactgtgcccagccctttctatttaaaatgttttaacagggaaatcctgctaaaactgggaaatgtacatttcgtctggggtgcaatgtgcacattgggttggggtggcagggatggggacaggacggggacgctatggcgtggtgccccgcgtggaatctcaccctctgggcggctggttgcttctccggcctcatttcatttgatgacctttccacttgccccaccccgaggcggttgttgcaggaggagaaggaagtatgtgcctgtcccagggccggcctgggtcccacctggggagaattccacaggatgaagcgagcaggcagtcgcctgtgaccccagcttcataaatcaaatatgttagcaaatcctgcccggcacacagcctggggcacttgcatggagccagtgactttttggtgtgtccggggacagactgcactatggagagggatgtcagggctgcccatgctctccggaggcagaagccagcacatatgagcaagtcaagcgctgtttatttacgatgaaaataccaagctggggggtgggcgtggtggctcacgcctgtaacctcagcactttgggaggccgaggcgggtggacggcttgaggtcaggagtttgagaccagcctgggcaacatggtgaaaccctgtctctactaaaacacaaaaattagctgggtgtggtgggcacctgtagtcccagctactcgggaggctgacacacaagaatcagttgaaccgggaggtgaaggttgcagtgagctgagattatgccactgcactccaggctgggcgacagagcaatactctgtctggaaaaaaaaataccgagctgggaaaacagccgacaaaacactgtaggagtcttcttggggccacaggtggtgtgccccaggtccacgtgggcctcagacatgggggcagggctatcatgttgtcgagaagtttttttttttttttttgagacagagtcttgctctgtcgcccaggctggagtgcagtggcgcgatctcggctcactgcaacctccgcctcccgggttcaagcgattctcctgcctcagcatcctgagtagctgggaccacaggcgtgctaccatgcctggctaatttttgtatttttagtagagacagggtttcaccatgttggccaggctggtctcgaacttctgacctcgtgatccgcccctcttggcctcccaaagtgctgggattacaggcataagccaccgcttccggcctatctggaggtttttaataaccacagaaaacctcaacacgtctgtgtaaaaccttccaatgtcaaggagtgagctgccccagggccccccaaggcctggctttcagtgacactcccttcaccctaaagccccgcaaacgttatttattatttattttttattatttttttgagacggagtctcgctgtctcgcccagcctggagtgcactgacacagtctcagctcactgtaagctccgcctcccaggttcacgccattctcctgcctcaccctccccagtagctgggactactggcatccaccaccaagctcgactaacttttttttgtatttttagtagagacagggtttcgccgtgttggccgggctggtcttgaactcctgacctcaggtgatctgcccaccttggtctcaaagtcctgggattataggcgtgagccacccagcccatgccctgcaaattttaaaatgctgcatgttttacaggaaagggtctggccccgggaggcagggaaatcctaccccctggactgcagcatgtccgtggccagggcaaaaaggggcatccccaggtgtgtagccacctttgggagcacccgggatcccttcccaggcctccacagtggagaaaatgaggcaacgagtccaaaggacagcaggcaggagggggatctcggatgaggcggcggctgggtctgggaggtttcttgggggagcaggagttgagagatctagaaaccgccagggtggacgcactcttgccacatctacaaagtagtttctagaagtctgaccctgaagcgaggcagggaagataggcaagaccacggcttctctcccgtccttccctctggggtgccgtggggctccaatgaagctgcaggatggctgcgcacaccgcagggatcctggcgcggggtccatccccacctagcccagactgcccctgctcccctgggactccgtgtcctttcattccttgccaatggcagggggtggccgggaccctggggtttccaggaccggccgaggtcccgccggtttggagcacaggcagccaacacattccccccggccctcccggcaatcctgagggtcctggttacccacagggcggcaccttcaacacttttttttttctcctattttttattttttggggccacactccgtcgcccaggctggagtgtgatggtgagatcttggctcactgcaacctccacctccccaggctcaggtgattctcctgcctcagcctcctgagtagctgggactacagttgtgcactaccatgcccggccaatttttttttttttttttttttttttttgtagagatagggttttactatgttgctcgggctggtcttgaactcctgggctcaagtgatcttcttgcctcggactcccgaagtgtttagattacaggtgtaagccaccaagcctggcttttttttttttttttttaagtcatgtgagactttagggcaaaacataaaggagagcagcctggggagctgtttgcaggaggtgtcaactcatctcttctttggtgtctgcagaaaaaaaaaaaaaaaaaaagccacacaagactagaagggtcaccctaagaagaaaaggacaatccagcagttcccacagaaccacaagcccccaccttctgctttgtttcctccagaaacacagttgccagccacccttcccctacaattcgcccgcagataatatcagcttgctggtagtctccaggaagtactgaagggggaggctcacagcctcaagagctttagagagctcagagggaccctagaacagcccagctgcccaccacacctagcccagaggtggcctcctctatccgagcacacagtcccgaaggtagaaaggctgggctttggatctcggacaaccggagaagcaggcgatgggcctccgggaaccccgaagaccccaggacaagccctcaccgtttcatctgcagcccactgcggcggaacagttcaaaggcccgaaagtgtcacatgccctggtggtcacttctgatttgttgggcgaggagaggtgacagaaccacccgccctgggctgggcctgctgcggacgcagggggagtgcagggcgtgtctcgggacctgctggggtttccaaccaaaccgacagcttggaaagccagcgcttcctttctgtggggctgagtctcagctcagctgccactgctgggagcccccactccctgaagcggggggacagggagaggatggtgccacgctggggaagaggcaggggcggccttcccgcggaggctacgtgacaggagcagtgtagaggaagtggtttccatcacggaaggccgaagctctgccttccacaggggcagagatggtggcggggaggacacagagggaaaccaggtggcatttcccttcttttttttcagtagccttgctctgtcacccatgccggagcgcactggcaccatcgaggttcactgcagcctcaatcccctgggttcaagcgatcctcccgccttaggctcccaaagcactggaatgacaggcatgagccgccgcccccagcctcactctccttccttttggtgagagccgccatcgcctgggggctcactgcaggtcttcatcccttgacccaaagggagaggcgagctctccctaagggagggccctgcgccctccagcctcggcgcccggcgatgcgggtcagctcagggatgtcctctccgtgctgggctgaagcaaagcccagcacccaacgccgaacggaagaaagaagcaggatggcgcggtttgctttttctctccctgttttgttttgtaacctaaggaagcagagcctctgagaccacacacagcagcgtcgcccgtccccagaggcaccccggccaggacgggcaggagaggagacccccgttcctgcatgcgctgtcgccccgccacggtgctctccgcaggggtgaggcaggagggtgggtggaggcgccagcctgtcctcagctggaagggcggggcatggacagggacggtgggcaggtcaccagcgggacgcagggagcccggccactgtcacacggcggtgcgcgtgggtgtgccgggctggttcagccgcagggttttacacaaccagccggcaaaatccacttcttccacctcggaccgcttgatgaaggtgtggttctgcaaggaaaggggagccgtgagcacccgggcctggagtcacagtaggacggggagggccagcgtctgcccagccctggcagatggtacgggacagaaagcaaaaaacagaggagaccctcccttccccacaggaagacgcactcggggtaggagagggaaagaaacccagaaaggggcagcggcgtgtgccaggcctgggaggggtctcaggatgctgcactccacctggggcggggacaccaccagcacggcagcctgcgctcccaggggagggtctacgctcgcgcaagcccagggtcctccggccgctgtggacaccggggccggatcattctctggcgtggggccatcctgggtactgcagggtactgagcagcgtccctggcctccacccactccatgccaggggcttccccaagtcgtgacaccacaatgtcctcagccattgccagggtcccccggagcaggacagcccaggcaagaacgggctgttccacagaactccgcgaagagcattgtacaggcaccgtcccactcgccagcacatgaggctccagagcccctggactgtggctcccatggcttgagaacaaaagcctcaattttatttcagtttaacaaattaattaaatacttttactttaattttttttttttttagatggagtttcactcttgttgcccaggctggagtgcagtggtgtgatcttagctcactgcaacctccgcctcccgggttcaagcgattctcctgcctcaccctccccagtagctgggattacaggcatgtgccaccacacccagctaatttttgtatttttagtagagacggggattcaccatgttggccaggttggtctcgaactcctgaactcaaatgatcctcctgcctcagcttcccgaagtgctgggattataggtgtgagccaccgcaactggccttaatttttattttttgagacagtcttgctctgtcgcacaggctggagtgcagtggtatgatctcagctcactgtaacctctgcctcccaggttcaagcaattctcccgcctcagcctcccaagtagctgggattacaggtgcgtgctaccatgcccagctaatttttgtatttttagttgagaccgggtttttccatgttgcccaggctggtctcgaaatcctgtcctcaaatgatccgctcacctcggcctcccaaagtaccgggattacaggtgtgagccactgtgcccggccccactgaacacacttcaacagccacgtgtgaccagcggttcctgtacaggacagcacaacatgagaagcctcttggttggaagggctgggggaggagggcgggtgcccttggggaagaggctgtgctgggccaccccacagtgggtgagtagaggcctttggggttcccaggagggtggtgtccaggaccttgggcccctgaatgctgcctcttttgcagctggaggcaggccaaggtgcctatcttcctaaaagtcggtgtaggtatgggtgaaaaaccaaccaacttgataggacacatcttggctaggtccaggatacccaacaggggagcatttttaagaagctggttcaaaaatggctatttcagccaggcccagtggctcatgcttataatctcagcactctgggagacctaggtgggtggatcacaagttcgagactggcctggtcaacatggtgaaaccccatctctactaaaaacacaaaaattagccgggtgtggtggcacgagcctgtaatcccagctactcgagaggctgaggcaggagaaccgcttgaacctggaagatggagtttgcagtgagccgagattgcgccactgcactccagcctgggcaacagagcaagactccgtctgagggaaaaaaaaagttatttcaacattagtacccctctctttttagttatttatttattttggagaggcacagtctcaccatgttgcccaggctggccttgaactcctggcctcagagagccatccccctatggcactaggattccaagtgcccaccacaatgcccagcctgcctcattaaaaaagaaaaaaagtcacacatgccaggtgcagtggctcacacctgtaatcccagccctctgggaggccaaggtgggagaatcatttgagcccaggagtttgagaccagcctggacaattagcaagaccctgtctctataaaaaaaactagctgggcaggtcgggcacggtggctcacgcctgtaatcccagcactttgcgaggctgaggcaggcagatcacctgaggtcaggagttcgagaccagcctggccaacacggggaaaccccatctctactaaaaatacaaaaattagctgggcgtggtggcagccacctgtaatcccagctacttaggaggctgaggaggctaagacaggagaattccctgaacctgggaggcggaggttgcagtgagccgagatcgtaccactgcactccaacctgggtgacaagagtgagacttcatctttgcggggaaaaacaaaacccacacacaaaaactagctgggcttggtggcacacatcggtagccccagctgctcaggaggctgagtgggaggatcacttgagcacgggagttggggctacagtgagctacaatcgcaccactgcattccagcctgggggacagagcaaggctgtatctcaaaaatttttttgaccaggtgcggtggctcacatctgtaatctctgcactttgggaggctgaggcaggtggatcacctgaggtcaggagtttgaggccagcctggacaacatggtgaaagcctgtttctactaaaaatacaaaaattagccgggtgtggtggcgggtgcctgtaatcgtagctacctgggaggctgactggagaattgtgtgagcctgggaggctgagactgcagtgagctgagattgcttcactgcactccagtctgggcgacagagtgagactctgtccgactctcaagaaaaaaacaaaactgaaagccacattccagtattagaaggcacccggttgggtgtctgtagctggcatctcttcttttcttacaggcacagaaagtaacgggctgtctaggggggtggcatctccaatccgccaatcagctgtcgaggggtttgaaggtcgctgacggtggctgtggtatgggaaagcactcgggatgcaggctgggctgagggcaggaggatgatgcccggggccctcctctgagggtgtagtccccgctggggaggcgagttttggtgaacagctgggcttccgaggatatcagaggatgggggtttaaggggacaccgaagtacgcacggcctcgggggacctgcttgccagtgtgcagaacagggatggtcaccctctagtttgcagggaaaggagcctggggggctgagagctgcctccagcctctcatgagggcaaagaagcccggggtctcatcctgtgggtgcgggaccagcaccaggcaggagcggcggagctcagagcccagagctgttcccacgcacacaccctctgctccccgcagccagcccaggatggcttctctcatggatgagagagacccacagagggtcctcggcgtggcctggcacacccggcctgcccacatcctggtcgcaggtgctggctccccgggcagggccaggcccagcagccttatttcctggggcctgggtggcagcctgcaccctcccggtcccagaacccgctggcatcactcactgtgagcatcttcaggtccgcccgctccgctgggttcttgatgaggctgggggttccaagaggcaggaccgggaggcggtggaggagacaagacagggcagtcagctggtggccccggggcacccgcgtgtgggccgtggtcggagggggcctggatctctccgaccagagagagtggcacagagtggctgctctgttctgcctcctggcagaggacgagggatccacctctgcactttggtgccaggggcaggacaccccccagcgggagggtgagagggaaagagggtgggaaaccccgcctggtgggtcagaagcctggacgcaaccccagctaactgtctaataaaaccccaggcccggggcaacatcgccggagcgcacgccaagggcccggggcaactccggcaccaggagtgcggtgccgttccacggcgtcccgagctcacacacatggaccggccctgtgggcagcggggtgtccgcagctccttccccgtggtctgcggcacatgcctgtgaagcccacgccacaggtgctgctgggtgcttgggggcaggagaatggagtggggctggcgaccctcccagaacctgcgggcggatcccggggagcccacagtcagcacaccaggggtccggggaccagacagaggcttctcctgctgcagacagtgagctggggacaccgtcatgtgcacagggcctgcaatcctgcttcacccctgggctcacggacaggatggcatggcagccgggagctgcagccccacagctctgggaaaaggaatctggcttcccgttgggctgagtcctgcctaacgctgcactgggattctggatgggcaggctgggccacgggccccacccaggacccggaaggagtggcacatctgggtcccggccaggggtgtgggcagcccggctccacctaccatttattgacaaactcctggaagtcgggggtgaacacaccgttgggcagcttaggaggtggctgtggaggagaacagagggtggggtcagccctgggcatcgtcagggaccctcggctgcagccctctctacccctcactgtcctgtccggtcacccaccctgcaggcctggccgacaccacatgccaactgggctgcaccctgtcagaggtggccttctcccgaaagctctcgtttgagagtcacggctgcttagagggaaagagtggggtgcgtcccccttttatcaacaggacaacctctcgagtgtcgtcacttgcttccttccccagtgtcactggctgaaggatgagctttgggactgggccccacagagggacatctggatccaaagttattttgttttgagacagtctcgctctgttgcccaggctggagtgcaatggcgtgatcttggctcactgcagcctccacctccggggttcaagggattctccagcctcagcctcctgagtagctgggatgacaggtgcccaccactgcgcctggctaatttttatatttttagtagagacggtatttcaccaggttggccaggctggtctcgaactcctgacctcaggtgatccacccactgtggcctcccaaagtgctggaattacacacctgagccaccgtgcccggccaaactgggtccacagttttaagcccaagcactggggagcctggcctgacacacgtccccggagcgggagtggccgtgtaagcggtgccagcagggcaggggcaggcctttcccgcgcaggggcaggggcgggaagaggcgggggagaggtcgggggatgtgctcactgggcatgggtgtggctgctaggtgcagggagagctgggtcaccagggccaccccacctggctccgtcatcatctcgccacccaaccccaggcctagcccagtctgcaggcagctcaaatgcccgtttctctgccccagctccaaagggccaccaaagacacagaaacccacagaaggcccagggaggtggcccggcctggtcacgtggccaacaggaccttggggtgcagtcctgtgcctccctgacagctgcaggcctggaaggaggccgcgtccctccttgtgccttgttttactcatctgggcggtggaaaccctcatactgtggctcactgggttgttatggggactgacggagcaggagccaccccgggacctacaggtccttctaggctctctgggcctccttccaagaggcaagggccattcctgtacctttctccgtggaagcggggtgatttatgagtccacgcccacgggcgccaggacgctctgatgcagagacactgggccactgctcaaggggcaggctggctcctcggcctgagcccagggctgctggcacacacctccctctggactcagggtgagaggctgcggtgggaattctgggttcgtcttcataaaaaaacaatgcccttgggaaggagctgggcttgtgcagcacagtagaagatgggagacgcgacacacgtggaattggttcaagaattgcttgaacctgggaggcggaggttgcagtgagctgagatcaagccactgcactacaaagctagacaatgtctcaaaaaaaaaaaaaaaaattagctgggtgtggtggtgcgcacctgtaatcccagctactcgggaggctgaggcacgagaatcacatgagcttggaaagtggaggtttcagtgagccgagaaggcaccactgtactccagccttggtgactcttgctctggtcagagagagactctgcctaaaaaaaaaaaaaaaaaaaaaaagaaagaagaaagaaaaggaaaagaaaagccaaaaggcatcaagcacaaacctcgttcacaatatagtccaggagttcaaagatggccatggcaggccggctatccatcccgtgacctgcacagggagagagatggaggtgagatgggccgatggccacctcacttctgctgggggttgggctcccagggggctgatcaccaccaggcgccctcctccacatgccagcctaaattggaggcgggtgtgcagaggcactggacaaagctcccctgcctgactctgggttccattccctgggacagctactccttgcctgagcctctagtgaattaaaaaaaaggcaaaaggaacaagaacattttttgagaagtcacacatttggctcggtgaggcttgccggacgtgccaaagtcatcacccctcctctctggagggcagggggagggacggtgctgaccgcaggcaaggacagccgcgtgaccttgcatggagctgctggcggtgatgggggcaggccccaagtgccactcaggacgggagactggctaggggtggctgacccctgtctgagaaccagctggccaggcctgggcttggcagctggactttcgccttctgcccgtcctgaaatgggcaggtgggctggggccctgggctggggatggtataccacctgagagttgggactgggagaggctgaggctaggcctgaggataaggacttgggggcctctccctgggatgagatcaagacatcccagcagtctggctggagaggaggaggtgggcttgccagtgctatgaaaatctccttctcacagccccaatccatccgggtaggaccacaaaacgtggcctgttcgtgtcataaaatactactcagcctttcaaaaggacccaggctctgacacgcaccatggcgtggatgacccttgaggacactgcgctccaggagagaagccacacacaaaacacagaaggccacacaagtgtgtgaccccatttctgtgaaatgcccaggacaggccagtccagaggcaggaaggggatggagagtgacagctgatggggacagggtttcctcttggggagctgagaaggttctggaattagaggtgatggggcgcagcactgtgactgaaaaccactgaactgctcacctgaaatgagttgtggggtgtgtgctttgtagttcggaaacatggttttaaaaccaaccacagtccgctacagggtcctttggggtctgacgccaccaactctccctgatgtctgactttaaaaaaaatcacaggaccctcctgtgattctgcaccaagcagggtccgcccccggctcttccctcaggcggtggaagtgtccgctcggccctctctgactggcgtcagggagctcccgctcccgaggtgcccgccctaagtgccggattgtcctctgcgagcccagctgtccctggggcctgagccctcccgccccctcccgggctgtgtcccctcctgtgtgtgttggggccggagccaacaggccactgagggccatgccaagtccaatctccacttcaggactccctggaaggcttggcccgcagcacaggagcgtgtcacctgcagaatgcaggctctgtggcggccaattccttccacttttctgtgcgtttgaatgctttcgggataaaatgttggaaaatccaactgcccaggggcttggtggcaaagctgcgctcccagatccctccagctggcaacaacaggtgcagctgccccggacagaacaggtttggggtgctcactgcttccagctctgtccccggaaaccccaggaccatgggaggactgctgaccacagtcggcaccatccagggggacaggtggtgcgccaggggcagaggggaggcagctgctgaccctggcacagcaggccccgcgcagggcactgcgcgtccagaccggaagttgcagattcaggccgtaccgctgacggggcgcccggggggcctcggccgaggcgagatgctgtgaggctctccttcttccccgtcgaccacgggccggccaaagatggcctccagctctttggcgtcgggcggggggatggggtaccttccgacggccagctccaccagggacaggcccatgctccagatgtccgactgcaccgagtaatgtgtgccctgcaaccgctccggctgcagcagagccagggaggaaagagcccagaggggcgaggatggcagctggaacccgggaggcttgccccgttacagcccccgtcaccctctccatggctaatgaccgcagcaatggatagagagctgttacgcaattctacctcccggctcacccacccagggcctccctgcggcacttgctgaagaggcttccagcccgaggcctggagctggtgttgaccgcagctcttgaagagcctgcaatgctcagcacttttgggaatggatgatgggccccaggaagcaggggcctcctcctccacagctaacatctcagaggctgctccaaggctcaatttggcaggttgctgaatccccagtcgtttcctgaaagaccccagattccaattccttggtccagaaattaactaagggccgggtgcagtggcccatgcctgtaatcccagcactttgggaggttgaggtggaagcccaggagttaagactaggctagccaatatggcgagaccccatctctactaaaaacatttttttaaaagttagccaaggctgccgggcacggtggctcacgcctgtaatcccagcactttgggaggccgaggcgggcggatcacaaggtcagattgagaccatcctggctgacatggtgaaaccctgtctctactaaaaacacaaaaaattagccgggcgtggtggcgagcgcctgtagtcccagctactcgggaggctgaggcaggagaatggtgtgaatccgggaggcggagcttgcagtgagcggagatggcgccactgcactccagcctgggtgagagtgtgagactgtgtctcaaaaaacaacaacaacaacaaaaacaaaaaccaaattacccagctgtggtggcacatgcctgtagccccagctgcttggaaggctgaggcaggagaattgctcccgggtgggaggcggaggttgcaatgagccaagattgtgccattgcactccagcctgggtgacagagcaagactctgtctcaaaaaaaaaaaaaaaaaaaaaaaaaagaaagaaacctggtaggcactgctagagacaaaaacctaagagagaattccaacaggaaggggagatctggccgggcgtggtggctcaggctcactgctagtggaatcccagcactttgggaggctgaggaaagaaggtcacttgagtccaggagttcatgagcagcctgggcaatacagcgagaccccgtgtctacaaaagattagtaaattaacaaataaaaaataaagagcaaggggaatccgaaaagcaggctcccaggaggcaccagctttagacgtgccttgtggcaagtggggagagctgatgaaggggagggtgcagctggggtgggactgtcccgggggtgctaacagccatgtaggagtgtgtgcccacgaaatagttgggaaagcctcgtgggaggcggggagagctgcgcaggagaactgggagggacagctgcgcaggagacatgggggtgagagctgagggggagagctggctggcagagctgggtggggagagcttgggggagagcagcagggaggagagctggaggggagagccagcggggactcacagccatgtaggagcgcgtgcccacgaaggagttggccatggagtcgatgagctggccgctcaccccgaagtcacacagcttgatctcccctctagagttcacgaggatgttggagggcttcacatctggaggcggcaggctgcgggtgaggggcgcccaacagttgcctgccggcccccggggctctggggagggcgggctgggccttacctcggtgcatgatctggtgcttctctcggaggtacgccaagccccggagaacctgcaggggagcgcggagggagtcacgggacaaggccaccagggcttagctcctgaccgagcccgggggtcagagctgagcagtcagagctggagcgagggagctgcggcaggaaccatttcaggctgtgaggagctcgctggggtggagcaagcgaggccagagacgagacagtgctgacagccctgtgctggcgtgtgcaagtcaaccccggttcccatggccgcagtgccgccgatgccactactgcctttgattcagagcacacggcttagccccagggaagctgagatggtggcccatggcccgggagtaggctgggctgccgagtttgcccacatcagcctgaaaggcagcatctggggtcccagggactgtgctaagggcccccagatgggacgggctaagggtgcctgggaaggacgatgtttcccccaggcccgccctggaagcagcatcccgagaagtgaagcaagcagcacaggcagtgtgacggcagctttcaactcggaaacgcgtgtctggcagcatgcgtcctgtgtcttaatccaacactggtatgggcaggcgggactcggcccctgctatggacaaggtgcaagctccaagaagcaacacgcacggtctgctgaaaccacacggctctacggagcagctgtgctggagaccgggcagcagagacgcccttggccccggtgacatttctaacagcaatggtgagtgtgtctggaggtcctggcgtcccacatcccaccccagagtctccctttcaacaagctcctgtcccctgcaacgtgccagctgccaacatccccctgccacgaggggcagaggggaccagtgtggcaaacagaggatactaagagtgaagagggacctataacgtcttcacttggcagatggtgacctcaggccccaaaagggacgtcacttgttcaagctccacagcaggtgggcacagccttggccactctctttctgcaggggccaccctaacccccaccacactgtgagtggctcccggaaccctggccgtgtggaagaggtccgtgcagagtgcggtgggggcgcgatgtgggtctgcggtggactcaccgcgatgctgactttccccaggatctcctcgggaatcctcttggcctctttcagcacctggtccagggagccgccgtcctagagggcacacaaggagtgagtgcaggctctgcgcaggtggccgggaagccacggatgcgtccccccactcccggcgagggggtggtctgcctcctgacgggaagcaggggccggagcccaactccacccacgggccaagggcagggcgtcttctgacagttctgcctttgggtctgaacacccacccacaaggtggggaaggaacagggcccagggttcccccgcctcccgtcccatcctcgaatcagttgcgtgactcggccctcctgaggtcgccacggcagaggctctgctccgggccagcccaagccgcggccgggggctcaggcagctgtggggcccgcactccctgcagcctacgtggtgggcttgtctgtgcgccacgggaggcggccaggctggagaccagcgtcttgggcctgcgtcctcttcccagcacacgaagggaaggggagggtgagggcgcggaggagacgcgggtgctgccccgcgtgggaggaggcggcgggtcgctgtgtgcccgtccagacccccagggggctccctcgccaagccctgcggctccactgctgggcgtctgccctgcgcctgtccctgccacctagggcagaaaggccaggccgagtaggaccaggggccagggggtgcatggactgcaggagggatcccagtgacgccagcccaggtgacggtaacctcggcccctccccacagcctgtggtctcctcgccactgtgccgggcatcctgcggagggcctggaaacgagtcatcatgggtaggctggtccccgggtgtggccccacatccatgtcataaatgatgaaacagaaattccatgtcttgcccaaggctgcctggcaacaaacctggggaccaaaacccccaaatgccaaaaccccaggcactgggagccacccaaggtgcctcttcagaggcagaggctccggacacacctgccaggccacccccaggacagcaggggtgacaggccaagttcccactgccaccgtctggcgtgcgtctcttctgtgctcagcagagaggaaagtggaactgaggctagagagggcgggctggaggagcctggagaggctggctggggagcctggatttccccaccatgctgctccaggactcctgcaaaagcccagccttccctgggatggctttcattcacatgggtgggaggagccgggggagaaatcctgggactcaggggtgcccgggttgccgctctctggccacttctgcccagctaggcttggagagaaaggccgaaggcagttctagaaaacccaacacgctttgagacctctaaagcatacacgtgactccatccaccagctccaggctgaagacgcagacacacagggtgagagggcaggtatggccagggctcagacagcccaggaggaggtgccaggacgggagctccagtgagccagggccaggtggaagctgcttctattctcagtttttatcaatctaccttaaaagaattacttaaaatgaggccggacatgggctgggagcggtgactcacgcctgtaatgccaggactttgggaggctgaggcaggcggatcacttgaggtcaggagtttgagaccagcctggccaatatggtaaaaccccatctccactaaaaataaaaaaaattagctgggcgtggtggtggatgcctgtaatctcagctactcgggaggctgaggcaggaagatcacttgaacctgggaggcagaggttgctgtgagtcgagatcgtgccacttctctctcgcctgggcgagagagcaagactcctcaattaaaaaaaaaaaaaaaaaaagccgcacgtggtggcgcacacctataatcctaccactttgggaggccaaagcaaaaagaatgcttgagctgaggagtttgagaccatcccgagccacacagtgagaccccataccaaaatcagccgggcgtggtggtgcacgcctgtagtcccagctactcagaaggctgaggtgggaggatcccttgaacctgggaggtcaaggttgcagtgagccgagatcacaccactgcactccagcctgggtgacagagcaagaccctgtctcaaaaaaacaaaaaccagaaagagaccaacgactcgaaagaggcagggtggcgaaaaccaaacagacgcaccaaacgcaaccctaaaacccctgctccccagcacagctccttccgtcttcgtttctcctggggccgcaatcaatgtttgtttagtgagaaaattcaaagagcctctccccggagatgagggcgggcggagcgctgtgctgcagcctcaggagctggtggaagacgcctcacaggagcatcgctctctctgcagccgcctttctccactgtgacatcggggccaggtcactctctggggtggggccgacctgggcactgcagggcgctgagtagcgtccctggcctccatccactccacgccaggagcatcccccagttgtgacaaccacacacatccccagacagtgccaggtgtctcctgggagggagaactgcccctggttgagaagggctgatctccagctataaagaccaaagtctggcagggtaagcaatttgtctgagtcacagagacaggatgtggtgcagggggtattgcagctgtgtactgctgaccccaaatctcactctgtgcatgaccatacacgtctaccgtgtgtgtgtgtgtgtgtgtgtgtgtgtgtgtgtgtgtgtgtgtgtgtgatgtttaaaatggtcttgtaactgtaattttgttacgtaggtagtaggtgaacacatttttctttctttttttttttttcctgaggcggagtctcgctctgttgcccaggcgggggtgcagtggcaccatctcggctcactgcaagctccgcctcccgggttcacgccattctcctgcctcagcctcctgagtagctgggactacaggtgcccgccaccacactcggctaattttttgtatttttagtagagatggggtttcactactggtgttagccaggatggtctcgatctcctgacctcgtgatccgcccgcctcggcctcccaaagtgctgggattacaggcttgagccaccgcacccggcaaacacatttttcttataaaaaattcaaatgaggataaataacctggacgccgcatcacttccaccattcccccctcaagtgtgacttatattgttccagatctttcttcatctctctctttctttctttcaggcaggggtcgcccagactgcagcatagtgctgtgatcttggctcactgcagcctccacctccttggttcaggcagtcctcccacctcagcttcccaagtagctgggagtacaggcgcgccaccatgtcctgctaattttttgtagagacgggggttcctcatgttgcccaggctgctctcgaagtcctggctgaagaggtcctcccacttcagcctcccaaagtgctgggatcacaggagtgagcacctggcccccgcatcttgctgtgtatttggaaacacagactcgggactcactctcttgcccaggctgtagagcagtggctcaatcatagctcactgcagcctcgacctactgggctcatgggattctcccaaagcactgggattaaagcatgcttgcccagccagagtttaaaacaacatcgaaatgggctcatgtctgtaatcccagcactttgggaggccgaggcaggagggtcacttgtggccaggagttcaagaccagtctgggcaatatggagagaccctatctctacacaaataagcaaataaattagctgtgcatggtggctcacgcctgtggtctcaactactcgggaggctgacgtgggaggacagcaccagtacactccaggctggacaactgagcaagaccctgacttgaaaatacaataaacaaatgaatgggccaatgctatgtttattttatttttcttttattttgaaatggagtcttgctgtcgccaggctggagtgcagtggcatgatctcggctcactgcaacctccgcctcccgggtgcatgtgattctcctgcctcagcctcctgaggagctgggactacaggcgtgcgccaccatgcccagctaattttgtatttttagtatagatggggtttcaccatgttggccaggatggtcttgaactcttgacctcgtgatccgcctgccttggcctcccaaagtgctaggattacaaacgtgagccactgcacccagcccatgctatgtttattttctacaaccacccctccactacatgaatagtgttgtactgtggggatactcccattcagtacaccattgtggatttcactttgccactgcaaagcagccaaatatcattctttaatcactcccttactgatggacatgtccagtttccattacagtagaacaagacgggcattcttcagcagataggacgagacccccagaaaggccaaggggcacctctacgaggtccgtaagccactggctctcctttccccatcccatgaggccccactgtccactgggttcttgccccgagttatccagtaataggttcagaccccagggaagcagccagccccactgttcctaagttccagtcaccaacaagtgcttgccattttatataaatacatcactgggcacggtggctcacccctgtaatcccagcactttgggaggctgaggcgggagaatcgtttgagcccaggagttcaagattagcctgggaaacatagtgccatcccatatctacaaaaaaacttgccgggcgcggtggctcacgcctgtaatcccagcacttttgggaggcagaggcaggcggatcacgaggtcaggagatcgagaccatcctggctaacacagcgaaaccccgtctctactaaaaatacaaaaaattagccggctgtggtggcgggcgcctgtagtcccagctactcgggaggctgaggcgggagaatggcgtgaacctgggaggtggagcttgcagtgagccaagattgtgccactgcactccagcctgggcgacagagctagactccgtctcaaaaaaaaaaaaaaaaaaaaaaacaaacttaaaaagctactcaagcgtgctggtgcacctgtagtcccggctacctggaaggttgaggcaggaggatcgtttgagcccaagaggtggaggctgcagtgagctaggatcatgccactgcactccaacctgggtgacagagagagaccttgtaccccctaccccccacaaaaaaagaaggaaaaaaatgcaaaataaagatgacatagaaatatgaggaaacagcgtagaaatacagggaaatggctgcagcagccaggacatggatgcaacacctgtgcgtgccgggtgccatcctgggaggagctcacacagtcctcaccccagcagggactacgacctccctcagcttcacagcagaagcggcaagagtcctgtcccgaacccgtggtaagggtgagcggtggggccgagacctgacccggacgcccatcctcagccccggtgctaagctgcccctttgcctcactggggtggcctgggagggaatgaatcaggtgctgggcaggcccttccatggaaacctatgggcactcaggtgaattccgagagcatcgttcagcatggagagaattcacagggccggcgaggatggcagggatggcccccttggatgactttacttccacggatgctgccctgtcagggctcacccaatgctttaaaaatcaacgtgctccacgttgtttttgtttgtttgtttgttttgagatggagtctcgctctgtggcccaggctggagtgcagtggcacgatctcagctcactgaaagctctgcctccagggttcacgccattcccctgcctcagcctcccaagtagctgggactacaggcacccgccaccatgcctggctaattttttttgtatttttttttttttttttagtagagacggggtttcaccacgttagccaagccagaatagtctcgatctcctgaactcgcctcggcctcccaaagtgctgggattacaggtgtgagccaccgcccctggctagaccacctcggaacttttaaagggtgcactccataacacagacagcacggcctgtgtctccctcctgcagcctggtggtctgtgtggtgtcccctggggtgccagcacccactctgggaacccccattttaaattcaccaagaatagaggttgggggcgggttgccacactgtcccctttctgcatgggaggaagggggctcgagaactgagtcagccacacaaaacgaggatggacagaactcctgagtagcgagggtgcctgccgggcgcgaggaggagggggaagacgaggaagacgaggaggaggaatagggagcaccacatgacagaggggctgcctcagaccacaaagcgcttcctcatcctttcctcgccctttgatgccgccggcaacgtgactctgcgagcagcggggcagacgccaggtctccctcgcaggcgggaaaggggctccaaggcgggtgctgccttgctcgggtcacatggctacgtgggggccttgctcaaattcacttcctgccttcattacaaaactgtcaaaggggatcgcacgtttgcagggtgtcacccaagcattctggttttgcaaacgacgctgtgcggcaggcggtctgatacctgatgagctcggtgtggcggggtcggcagcatttcctccggggttttgagctctggccacttctccttttgttccacccaatctcacccacttctgggcttcgaggccagagtgtcttaacaagggggcacgtcagagtcaatgaagggggtgcctgtaccccaccctagagactgtggtcccacagatctgagctgggggaggcacaggcctgccttgacaagctcagactgccacactttcctgagaaggccatttaaaaacagtcatcagctttgttatgttttgagacagcatctcgctctgctgcccgggctggagtgcagtggcgtgaccaaagctcactgtagcctcaacctcctgggctcaagtgatcttcccacctcagcctctcatgtagctggtgctatttttatccccatttttaaatgttgttaacaattttaaaacaggcacgtgccaccacactcacctaatattttaaattatagagatggtttctcactatgttgcccagcctggtatcgaactcctgggcttaaatgatcctcccacctcagcctcccaaaatggtaggattacaggcatgagccaccgtgcccggcctaatagggatcagtttttaattgcatctaccctggaacccagcaattccctcacacagcttacctcacaggtgtgcctgcgagtcagtgccatgttatttgagatagggcagagactggaaacaacctacgtaccccccaaaacgggagtgttttccctctctgctgtcataaggacgcccgggatacagcaagagaaaaagcaaagctgggaggaagacatgagtgcttaaaaaacaaaatcattggctgggcgcggtggctcacacctgtaatcccagcactttgggaagtcgaggcaggtggatcacctgaggtcaggagtttgagaccagcctggccaagatggtgaaaccctgtctctactaaaaatacaaaaattagccaggagtggtggcgggcgcctgtaatcccagctactcgggaggctgagtcagaagtatcacttgaatctgggaggtggaggttgcagtgagccgagattgtgccactactagattctagcctgagtgacagagtgagactgcctctcaaaaaaacaaaaagaaaacaaaacaaaaccaaaggcatctacatatacatacttgtatggcatcgactgccttgagaaggatcccctggaagccagcgcactgttgcctctgaggaaaggggccgtgagggggtcttccttctccccaacatgctctgttccgtggaggccctgcccctgcccctgccccggacgcactcaccatgtgttccatgcaaatgctgatctccccgtcactgtagaaggccccgtagaagcccacgatgtacggcgagttgcattcgtgcaggacctgcagctcgcggatgatctggttccggatggccggcttgatctcaaggtggatcagctgcaaggggagaggggcgagactggcttggggggtgcccgaaaacgggatgaaggcatttggggcctctgctctgcaggcgttcccaacagtggtcaagaccaactcagtaccccctccgcaattccacccctaggtgtctgcctagaagtggacacatacgtccacacagaaacgtgtcccaagtgctcacagcagcacgactcacagcaggcaagggtggaaagaacccaggcgtccacccagggcagaacaggccaacccagcgcagcccacccctcactgaaacaggactcagccgtaaagaggaaccaggccaagaccccggccacagcgtgggtgaaccctgaggatgtcatgcttagtgcgagatgccagacacaaaaggccacataatatgtgatcccatttctgtgaaatgtccaggacaggctgatccagagacaggaaggggatgtgtgggtgccgggggctggaggaggggatgggggtgactgctgatgtggacagggttctttttggggtgatggaatactgtaaaattgactgtggtgatgaggacgatgccgtgaatatcctacaatccactgagtcacatactttcaaaggggacactgtaaggtatgtgaattacacctcaataaacctgttttcaaaaaagaccaattaagcaaacacttaattcccactcagttgtagtgggagctgtgtgaaagcatttttccccatcaaatcagactttgacaaagtgcttgcctttcccaggagggaggcagggcaatggctcccctccaggcctctctccacttggggtgggtctatcccgagccccttcccaccctcaagctggagacaccccgtggagacgttagccacacagagccgcgggcgcccctgagaattctccctctccttcaacccaagttcaagacggcaggggaaattttcatcaagttgaccccggtgccactttaaaaaggcaagaagccaaagatccgctcaagagatgcagaaaggaggcctggtgtgtggctcacgcctgtaatcccgcactccgggaggctgaggtgggcggactgcttgaggtcaggagttcaagaccagccggaccaacatggtgaaaccccgtctctactaaaaatacaaatttagccgggtgtggtggcaggcgcctgtaatcccagctactcgggaggctgaggcaggagaatcacttgaacccaggaggcagaggttgcagtgagccgagatcgcaccattgcactccagcctgggggacaagagcgagactttgtctcaaaaaaacccccaaaaaaacaaaacaacaacaacaacaacaacaaaaacaccacgggcaacccctaaccccatggacaagccccagaagagccaggacccccagcatggcaaggagcagcctgaggctttgggacggcaccctggagaatcacagcatcccgctccagccactgcaataagacaagaaaaagacatggtttccactcatccgccacagaggcaaagccaggcccaggtgcagtcagtgaaggggcggccaagcacggagacagctccttcctggaggagacctggggtcaggacgggaacaggaatgggtaagaccacctcaatgtggcaaaaagtccaccaaggagaatcaacccaggtgcctggggagcagcaacaaggaggtgacactggggccgggccttgaggaaggacagagtcaccatgaggaggagatgggggagggtgttccaggcagagggacaaagagccgcctgtcagcgggcacggaggcatgaaggagccctcgctgtgttcagggcagcaggaggctgaccgtggccacagcacagggcgtgtgtggggagtggcccctgctctaggcctgtgaccttgagaagcatggcagggcccggggcacggtgcccacctccccccgcccggccgctcctcaggctaagcgtctcccaccttgaccgcagccctggcgctgcctgcccctgcctgcccgcccctgcctgcccctgtagcgctggcttctcccctcaggccagcctgcagaatccagctccagacggtggcccctgggctactccactccctcatggtgaccccacaggccccagggccaccccagcaccccaggatgctctcccctccagccaggctgtaactgagaggtgctggtgctcactcccgttgcacaagggcctggtactgaagcttggatgttcacgtggaggttgggagatttactggaaaaggccacatttgttttcacaccgagcccttgaagcttggtgcgtgttttccatgttcagcacgtccggactgaccgcattttaagagcccggtagccacatctgaacgggggctgctgtcttggacggctcagttcctgaccaaaaacttcaaaggagccacagatgggtgacaagaagcaggaaagagcgcgcgttcggctggccgtcgcaagtcgtaatttaggagaggaagtggcggatgggctactgggaggaatcccagaggccttggaacccaggagctccgaacgtgaaatgaggccgtcggaagcgagaggccttctggaaggctgtagtaaatagcagaggcgagggaggccagtctgcacagggcggctgcggcgtgatctcagttttaatggttctgtaatacctggggcctgtcgagcgagcattccagataaacgggcagccaccactgagggtgtgcaaggggaaaggcagacagacagacagatggacaggaggggagggggcgttcctgagcacctgcaccctctaaagttcaccctgacaagcccgggggatgggtgtactgccccactggtgctgactgagcaagctcaggttcggagcctcggagccatgttcccagtggcattagctgctaagtcaggactggggctgcctcggggaacactggagcccgtattctttccaggacaccacagcccaggccgtgccagctctaatagctgattaaatgtggatggtgtcagggtgttaaaactaaatgccagacctggctcggaggtggagacggttgctacagaagaatgaggaatttgagccaggggtggggttgggggattcggagtaggaaaagagaggaaagagcttcactgagtgtcagcgagagcaggaggggaagaggaggaccgagccgccccccggccgccaccccgcaggcctggaatgatctcagcaacctcgtaaatcatggatcagaaactgacagctcccaagctggatgtagccaagagtcacgtgcagcccacactgcgcttccaaacatcctgaattaggtgttgtcaaaaattggaagagagccggggcagtggctcacatctgtaattccagtgctttgggaggctgaggcgggaggatcgcttcaggccaggagttcaacactgggcagcgtagcaagccttcatctctacaagagattttaaaaattaacacacaggctgggagcggtggccagctaggggaccgcagtgcagtggatctggaggctcagccccggcagctgctcccaagtccgagcagatccaagagggttcgaatccgattcaggcactgaccccacacagcctcggtttcttcaactgtaaaacgaggctgctgttcaattttaatgagaacacgcgtcaaaggtgttggcagcggcttcgactcaggtcgtcacttgtgagacagcagctggtactgtgaggtggccttgggcaggccgtgtgaccgccaccctggaagtaagctacagcggagtggaggaactcagaggcgagaacaaacactctcatctctgctatgagcatggacaattcaaagaagccccacacgcgtaacaagcagcaagttcttcacctatctccctggcccaggtaacgcggggacgctgctccaatgggagaggggtcagaggccacggtcaagccaaaaagacatttacaaaccagcatgacctcaaataccgagactgggccaggcgcggtggctcacgcctgtaatcccagcaatctgggaggccaagatgcatggattccttgaggtcagatgtttgagaccagcctggccaacatggtgaaaccccgtctctactaaaaatacaaacattagccaggcatgccagccactcaggaggctaagggaggagaatcgcttgaacctgtgaggtggaggttgcagtgagccgagattgtgccactgcactccagtctgggtgacagagcgagactctgtctcaaaaaaataaataaataaaaataagtaaataaataagatgaaatgaaaggagcccttgcagccctacctgcatagcagccagagccgctgagcccacgagctcaatgcatcctctcccacccgagttttcgggcactttaaagaaaacctaattttgaaagaattatagaagcacaggaagttgcaaaaatagtaacgagagtcccgtgcgccctttccccgcctcccccaagatgactgacatcttacatgacggaaggacagtactgacacccagagctgatgctgggacatctccacccaccagaccacagaacctgcccagccacgcctgccctcaggttcaaaggccccgatctccctttccccgctacagtaaagctgcaggtgggcccggcttcacctgcgcctgtcagcaggagcaggagctgctgatacagcaagcattgggttcatgtccactgcccagcccatcagggaccactggaggctcccccagaagcctgagggtccctggcacacacgaggactggcactgtctcaaggccctgctgtggctgtgtgaaccacacgcttgcctttttccacccagtgcttcgggcggaggcggacctgagctttccaaggctgctccggtttggaagaggctgcctgcagtacggggacagaaatagcaagtccgcggctgcacacttcaggagggagggagggcagcactctagaggccagaagacagagctgcagagctaaatccccgcaggagttgagccgctgctcccgaggaaggcagggccctcaagcactgctgccacctgcgcagacccacgggactaggtgcagtcacgttcccccagtttggggaactacaggatggtgggcttccaggaagaggcagcgttctaggtctgaaagaacaccggtgaggagctgaacaccctgtcaacactaagtcccctacttctgtgtttaagagccactgtccccaagtggtcacatcctccctgtatcccctgggcactattctcaaacacagagcacagaggctgcatcatggcccaggagcccgggatgactaagcacgggggccgtcagcaccagggcttgcagactttcaaagggtgggtgacagtcagctttgtgtgtctcctcggtgagaccacggtgcccagttgtcaaacgccagtctagaggttgctgggaaggtatgtttttaagatgtgattaacctttaaattggcagactctgagcaaagcagattactccaccccagggtgggtgagtctcagccaatcagctgaaggccttcagggaaaagcctgcccaggcgcggtggctcatgcctgtaatcctagcactttgggaggccgaggcaagaggatcacttgaggtcaggagttcgagaccagcctggccaacacggtgaaccccatctctactaaaaaaacaaaaattaactgggtgtggtggcatgcacctgtaatcccagctactcgggaggctgaggcaggagaatcccttgaacccaggaggtagaggttgcagtgagccaagatcgcaccactgcactccagccaattccttagaataaatctctctctacacatacactcaagtatcattaaggacagggatacactgagaaatccctctctgggcgatgtcgtcactgtgcaaacactggaaagcccattccacacccaggctcccatgctctgtacagcgcagtgctgagctgctgtctgtttatttaaatatagagaaccgaggcaggcggatcacctggggtcaagagttccagaccagcctggccaacatggcgaaaccctgcctctactaaaaacacaaaaaaatgagctgggcctggtggtgtgtgcctgtaatcccagctactcgggaggctgaggcaagagaatccttgaacccaggaggcggaggttgaagtgagccaagatcatgccactgcactccagcctgggcaacagagcaagaccccgtctcaaaaagtaaaaataaaaataaaaataaacatacagaaggcacagcaaaaacatggcctgatcatcttacgtcgccaccgctgcgtaggcggtctgtcactggctgagccatcgccctgaggtggctgtacacataggcgcaaacacacacacgcttcgtcttcatcgcttgtttctctggagaaccataacacactcgcatttctgaaacccccacgtgctagctttctgggaatatggatttcaagtgccctccagggcagaaagtagtcactggagggcacagctgtgtgtggctggtgtggctggcacggctcccatctgcccagaagctgggccctttctcaggacctagagtccctggtggggatgagggacagagcctggagctaatcagaatgcagagacccggctgccttcccaacctgcctcctgtttccagggggaccttccccaccactccccgacctccccgaccccgcagtgctcaccttcctggccatgatgaggcccgagggtctgtgctggactttggtgaccaccccgccgttgcccgcgcccagctctgagatcctttcgaagtcatcgtctttgagttcgccgaccttggctttctgggtgagaaaggcttccagccgcttcttctgctgctcgtcaagttccagctcctccagcttcttctgcaggtccaccaggtttgccctgcagagaccccccagggtaggggttagctacctagggagactccatctggccgtttgctatgtggccgtggtgcatcggcccccaggaggacacagactggattcctgcacttgaggggttcatggtgtagaaggaaaggatccatgctgtgtacccccatagacacaccaatgaccagaatccagggcggctccccgggaactgaggacgctgccttgatcctgtctcaacaagtctagcagacctcaggacctcaaggataagctgcagctcaaaggacccaggaagcctccgtctttttcttttctttttcttttttttttgagacggagtctccctctgttgctcaggctggaatgcagtggcgcgatctcggctccctgcaaccttggcctcccgggttcaagagattctcctgcctcagcctcccaagtagctgagattacaggctcccgccaccatgcccggctaatttttgtattttcagtagagacagggtttcgccatgttggtcaggctggtctccaactcctgacattgagtgatccgcctgcctcagcctctcaaagtgctgggattataggcgtgagccattgcacgcggccgggagacctccttcctaacgcacgagctccggaccatgtcgggaggagacgaggaagctgggatcgggtgaacggagcccgggccaagatgtctgtctttgcaggagatagaggaacaagcgttctgagcagcctcagagcacagaatgagaaccaagagtagagggcagaaggctcagcacaaaagctgcatcaggtaggcacggtggtgcacgtttgcagtcccagctacttgggaggctgagacacgagaactgcttgaacccgggagggggagattgcagtgaactgagatcttgccactgcactccagcctgggcagcagagggaggctctgtctcaaaacaaaacaaaccaaaaaacaaaaaaaacaaaaaataagcatgaccagcctgggcaacaaagtgagacctatagccgagcacagtggctcatgcctgtagttctagttactcaggaggctgagcccaggaggtcgagactgcagtgagccatgatcgtgacaatgtactccagcctgggtgacagagcaagaccttgtttctacacaataaaaaatttctaacaatttaaacaagcaagtacattgcactttattgggtgattcaaggaatcttcagaggaaatttcgacagtaagctattttcacaaatgccttgactcagaaccagatcctggagtaacagacaactaagcgcaatgcacacaggaacccattgctgtgcacaagcaatggaatgtaaaccatgcgcacaaattaaaatcttctagtacccatgtttaaaaagaacaggtgaactcacttcatttatttagagacagggtcctgctctacctcccaagctggggtgcagcggcacgattacagctcactgcagcctccaactcctgtcctcaagtgatcctcccacctcagccttcctagtagctaggatcacaggtgtgagccatcatgtctggctctttttaattaattaatttttattattattattattttctgagacaaagtctcattctgtcgcccaggctggagtacagtggtgtgatcttggctcactgcaacctccacctcacgggttcaagcaattctcctgcctcagcctccgaagtagctggaattacaagcacccgccaccacgcccagctaatttttgtatttttagtagagacaaggtttcgccatgttggtcaggctgctcttgaattcctgggttcaagccacctgcccaccttggcctcccaaagtgctgggattacagacataagccactgcacctggctgaaattaattttaataacacatttgatttaacccatcaaaaatgttatcattttcaacgtacaaccagtatgaaaaatgaatgaatgtttcacactgtttccgtcttaagcctttgaaatctacaatggcattattgcgcctatgctctcgtgggtttgggcaattcttgttttatgtgttgcctgtagccaggggctactcaaccaggcagtgcagctttaaatggctctctggaagaacaggccacctccagaggtcccaattcaggaaggagctaaagccaaggtggacagccagagaggggactgaagcagggaatgaaggcgtggactgctccttccatctggaaatttccaatcccaaagttcgaccactgttcgcctacagctggaagtggcgtaagccacggggcacacaggccagaaccgaggcgatggcgctggagctggtgctgcaaagagctcgctggaaggcaggggcctgggcaccgcttcctgggctggacaaacaccatctcattccattctcaccatcgtccccggaggcccaggcaggagggaacagactcacaggggtgggggaacctgcccgaggtaacaacacctgcctgaggtcaggacaacccctgctcatcttagtgtcccccatgaggggaaacagggccctagtaggtgctcactgaggagctgctgaacaaggacccagaagaagcagaaatggcgagaccctgggagtgggacagaaggtaaggaggggaacatgaatgaatgaatgaataacatcaatgaataaatgaatatttattttttttgagacagtcttgctctgtcgcccaggctggagtgcactggcacgatctcagctcactgcaacctctgcctcctgggtccaagcgattctcctgcctcagcctcctgagtagctgggattacaggtgtgcatcaccgcgctcagctaatttttttggcatttttaatagagacggggttttgccatgttggccaggttggtcttgaactctgggcctcaagtaatccacccaccttggcctcccaaagggctgggattacaggcgtgagccaccacacccagccatgaatgaacacttctgatggcagacttggaaggtctcaagtactgctcaaaacattgaaaatgcattctggagtcagctgactaatccatcttaaatttactggcaacccaactgtggttattaaacaaaacaaaacaaaaccttggcgtccctacagccagcttcctctcctgggggaatccttcaagagatgggaatcaaaccccacacggaagagaaatgtgaagggcgagttctgtgcagagaatgaggaacgggtccccgtgtctggctgtgcccgtgttgacttgcacacattggcatcaagagtcttcatctgggtcacagaaggccgacccccaagcgggagaggccaccagacatgccacagtccctgacacctggttcttgaggggtcacaccgcaggcacggcacccggaccccagccaagggccccggggatcgccctgccctgcctcggcctgcagaacgggagtgcagagatcaccctggcatgaccccaccagtgtgtgcccccaacacccagtcccctccctcgtcctggagcagtgcgattctgccagcacgccacccggaccccagcatacccctttctcagatcccttcacccaggcctctggtcgccctccacctcctcaaagcttctgcactgggtcagcccctcacaagggttttccggtccactcacttcagaatctgcacctctgctttcaggggccagcagggtcccctgatccccacgcctcctcgttcctcacactctggcttccctgtctcctcacacttccagcttcagggactccacacactgggcaccgccacaagcaggagatgccctctcagagatgcccatcttgacatcttgacctccctgggaccccatcctgaccccctcagaaccccaacatgagacccctaggaccccctgctctgccctcccagaacccccacaacatgaccccccgaggaccccctaacctgacccccccagaatcccccaacatgacccccgaggacccaacctgaccccccccacaacatgaaccccctggaacccctgtcctgatcccactagacctcccccagcagaaacccctccatctggaacccgctagaactcccatcctgaccccgctaaagcccccccatgtcctgacacccctaagacacccccttgtcctcagataccccagaactcccaccctgacccccccaaagtcccccgatcctgacctttctagggtctcccaccccatcgtgaccccctaggacacccctctcccacatcctgacccttctgggagccccctgtcctcccctctcttcccttttccctggttgtctatggacctcctcaccccatcctctcccctaagggacccccctgccccaccttggcaccctaggtgccctcttcatcccatgccaacctcattactcagggactcattccccaaaaggaccgctccccgcccccccaagacctctcagcctgtcctccccacccaggtgctgcactctcaacctgtggctcaggcaccctcccaccccatctctcccccataggaaccctcccaccccatctctcccccatagggaccctcccaccccatctctcccccatagggaccctcccaccccatctctcccccatagggaccctcccaccccatctctcccccacagggaccccctcaccccatctctcccccatagggaccccctcaccccatctctcccccatagggaccctcccaccccatctctcccccatagggaccccctcaccccatctctcccccataggaaccctcccaccccatctttcccccatagggaccccctcaccccatctctcccccaagggactcgcttcactatcatttcaatatgcagaacaccccttgcctatccttcccccacaggcccccaccgacacatcctctcctcccagggaccccctcaaccccatctcacaattcaggggccctgcaccccatcttctctctgcaaggacatctccttggcctgatctcacgacttagggattccaaaccccatcttttccccaaagggatctcccctcactccaatctcattactcagggaccccaccatctccccgatttcactattcagggaccgttcaccccatttcactactcagagacctaccaccattctgctactcagtgactccatgccctgtcttttcccacagggacctcccttggccctatctcattattgagggacccttaccccgtcttttcctaccagggaccctaccccatctcagtctcattactcagggacccctcaccccatcctctcccctctggagcccccttgcccagatttcctcctcaggggctgcctgacctccccacaccccatcctctcctctcaggaatgccctgcaccccgatttccctactcagggtctcccctcaccctcatctcatgactacggcaacctttactccgtcctttcctcttaggaactcttcaccctcatttcactactcaaggaccccacactgtgttctctcctcttagagatacccctcaccccgatctcactgcttggggagcctcatcctgttctctccttggggacacccctcattccgattttcctactgagggactcccctcaccccagcttcacttttcagaagccccacaccccatcttctgcactgcagggacctcccctcactcaacctcgctgctcagggacccctgtccccatcctctcctcttagagacatccttcaccccaacttcactactcagagactcccgttatcccaattccactcttcaggaaccccacaccccatcttttccaccacaaggacctcccctcgcccaatctcactgctcaaagacccccctgccccgtgcacccttcgccccgtcctccgagggccccctgccccgtcctcccccgagggccccctgccccgtcctcccccgagggtcccctgccctgtcctcccctcgagaaccccctgccccgtgcaccactcaccccgtcctcccccgtgacccccctgcctcgtgcactcctcgcgaacccccgtcccctcgccccgtccttccccgagggctccctgccccgtgcaccccaagcctccggctgacccctgcccactcactcggaggcgccctcgctggtaggggatgggccctcggcgatggtagggttgatggtgagcgccggcagcaccggcttcctccgggccagcatcggggctccgcgggccggcggcggcggcgcctctagccggggcccatagggggcgggccgggagcggtcggcgcctacgcgagcccggggctgcggccgcggcccaggccggcgtcggggcggccgagggcgggcggcgctgcgggcctgggccgagggtagccgaggggcgctggggctgaggcgagcgagccgctaccgctgccgaggcccgaagaaggctgacgccgcagcccgagtccgagaggcagggggaggggaggggcggccacaagatcgcggaccggcttctcgcgataacgggatcgggagccgcgatggaccccacccccagccgccgcgcctgcgcagcagcacaaggccgcctttcggaggggaaaggggcggagaccgacgcgaggcggtgccgggaccgggcgccctcgcttgccttaccacggcgcgtgtgcccaagcgcttggggcatgaggcgcgggagcaggggaggagacggagggatgaaggctggggtgatggtcgtgcacaggtgggcagggtagccagactcctgagagcctgtggtgccccaggctggggctgagagaacccgtaagaccccagaacagtggacgagacccacccagagtccatttaatctttttggcaagcgtggacacacgcccctagcccccaccgccttagagtgtcagttactccccctccttcatcagaacaaggccactctaaaacatttttaaaatttattttaattgacaaataaaattgcatatattactatgcgcatgttgaaacatttttattataaaatacacataacataaaacttgtcattttaaccatttctaaatgcacagctcagcggcattaagcaaccaccaccaccaccatctccagaattttctcatcttccgaaactgaaacactgtcccctatgaaacctcactccctatccccctccccagcccctggaacccaacgtcgtacttcctgtgaatctgatgattctagggacttcatatgagtaggatcacacaggttttgtccctttgtggctggcatatttcactgagggccacgtcctcaaggtgcctgttgtagctgtgttagatccacgttgtaacctgtgttagaatttacccacttgactactccgggcatacttccaatcgggtagccctgctccaaaaaagagcagaaaaaaaaaaaaaaagaaaaatttccctttttttttttttgagacggagtctcgctctgtcacccaggctggagtgcagtggtgcgatctcggcccactgcaaactctgcctcccgggttcacgccattctcctgcctcagcctcccgagtagctgggactacaggtgcccaccaccatgcccggctaatttttttgtatttttagtagagacggggtttcaccgtgttagccaggatggtctccatctcctgacctcgtgatccacccgcctcgatctcccaaagtgctgggattacaggcgtgagccaccgcacccagtcaggattttcctcctttttaaggctgaataatattctattgtgtgcatggactatattttgcttatccatttatctgccactagacacttcggtgaatcgtgccgctatgaacacagatgtacaaatatctgtttgagtccttgccttgagttcttttgggtatatgttctgaagaggaattactggattatatggtaattctatgttgaactttttgaagcaccaccttactatttaatacaatagccgtaccactttataagaaaggtcataggctgggcgcggtggctcacgcctgtaatcccagcactttgggaggtcgaggcgggtggatcacctgaggtcaggagttgaagacgagtctggccaacatggtgaaaccccgtctctactaaaacaaaaaaatacaaaaattagccgggcatggtggcgcgtgcctgtaatcccagctactcgcgaggttgaggcagaagaattgcttgaacccgggaggcagaggttgcagtgagccaagatcacgccattgcactccagcttgggagacaagagcgagacttcgtctcaaaaaaatcaaacaaacaaacaaacaaacaaataaataaataaaatacaaaaattagccaggcctggcggtgtgtgcctatagtctcagctactcaggcggctgaggcaggagaatcgcttgaacccggggggcagacgttgcagtgagccaagattgcaccactgccctccagcctgggcgacaaagtaagactccgtctccaataaaacagaacaaaaaaaaatttaattttttgccaggtgccgtggctcacacctgtaatcccaggaccctgggaagctgaggtgggctgatcacttgaggtcaggagttcgagaccaacctggccaacatggtgaaacctcgtctctactaaaaatacaaaaattacacaggtgtggtggcgggtggctgtaattccagctactagggaggctgaggtgggataactgaaccccggaggcggaggttgcagtgagccgagattgtgccatcgcattccagcctgggcgacagagccagactcacgctcaaaaaacaaaaccaaccaactggccgggcgcggtggctcacgcctgtaatcccagcactttgggaagccaaggcaggtggatcatgaggtcaagagattgagactatcctggccaacatggtgaaaccccgtctctactaaaaatacaaaaattaactgggtgtggtgatgcgtgcctgtagtcccagctactcgggaggctgaggcaggagaatcgcttaaacccgggaggtggaggttgcagtgagccgagatcacgccattgcactccagcctgggcgaccgaccgagactccatctcgaaaaaaacaaaacaaaacaaaacaacaaacaaaacactgctcctggggaagcctgctcctgggtttttacaatctgggcctttcagttttacttctcatcgctcccacccgcttgtccaaaattcagatggatgcatatgtggcctcaaataaggacaggccctttcagagacagggctatttccatgttccttctgttttgcctagcaatctttctcccattttatcctattttaggctttttttttctttttaagacaagttctgactctgtcacccaggcctcaggctggagtgcagtggcacgatcataactctctgcagcctccacctccctggctcaagcgattctcccacctcagcctccctagtagccctggctacaaacatacgccaccacactcggctaatttttgtattttttgtccagacagggtttctccatgtcactcaggctggtctcacactcctaggctcaagcgatcctcctgcctcgtcctcagcagtgctgggactagagccgtgagccactgcactcacctattaatgcacaagtttctgaagttcaatttcttggattattacaactctatacatccatgtaacacttccccttactccagaaagtctgttcactgcctttttagttcattctcttcctctgcacccagcagtagtgagctggtaaatgtttaacaatgagccattaaaataaggagaggccgggtgtggtggctcacacctgcaatcccagcactttgggaggccaaagcaggtgatcacttgaggtcaggagttcgagtccagcctggccaacatggtgaaaccccatctctactaaatatacaaaaattaggctggtcacgggtgtaatcacagcactttggcaagccgaggtgggcagatcacctgaggtcaagagttcaagaccagcctgaccaacatggtgaaaccccgtctctactaaaaacacacaaaaattagccgggcatggtggtgggcacctgtaatcccagctactcgggaggctgaggcaggagaactgcttgaaccccggaggtggaggttgcagtgagccaagattgtgcccctgcactccagcctgggcaacagagtaaggctccatctcggaaaaaaaaaaaaaattagctgggcatggtggcaggtgcctgtagtctcagctacttgggaggctgaggcacgagaattacttgaacctgagaggtggaggttgcagtgagccaagatcgtgccaccgcactccagcctgagggagactctgtctcaaaaaaaaaaaaaaaaagaagaagaccagatgtggtggctcatgcctataatccctgcactttgggaggccgaggcgggtggatcacctgaggtcgggagttcgataccagcctgaccaacatggacaaaccctgtctctactaaaaatacaaggccgggcgcggtggctcacgcctgtaatcccagcactttgggaggctgaggcaggcagatcacgaggtcaggagatcgagaccagagaccatcctggctaacacagtgaaaccctgtctctactaaaaatacaaaaaaattagccaggcgtggtggcgggcacctgtagttccagctactcaggaggctgaggcaggagaatggtgtgaacccgggaggtggagcttgcagtgagctgagatttcgccactgcactccagcctgggcaagagagcaagactctgtctaaaaaaataaataaataaaaataaaaatacaaaactagccaggtgtggtggcacatgcctgtaatcccagctacgagggaggctgaggcaggagaatcgcttgaacccaggaggtggaggttgtggtgagccgagatggtgccactgtactccagcctgggcaacgagagtgaaagtcagtctcaaaaaaaataaagttgacaatggtatcaaagatgcttacgagtggctgtaagccagctgcagtccactactactcccaaaacccccccagattctgcgttctatccccatagattagtttttgcctgttcaagagtttcatgtaaatggaattgcactcatggtgtcagttctttttttttttttttttttttgagacagagtctcactctgtcacccaggctggagtgcagtggcacgatctcggctcactgcaacttccacctccgaggttcaagcgattcccgtgcctcagcctccggagtagctgggattataggcgtgtgctaccacacccagctaatttttgtatttttagtagagatggggtttcaccatattggccaggctggtcttgaactcctgatctcgtgatccacctgcctcggcctcccagagtgctggaattataggctgggattacaggcgtgagccaccgcacccggcctggtgtcagctctttctgctttaggacaatgttttgtttttggttttggttttgttttagacaggattttcctttattgcacaggctggagtgtagtggtgtgatctcagctcactacagcctccactttctgggctcaagccatcctcccacctcagcctccggagtagctgggactacaggctcccaccgccatgcccaactaattttatattttttgtggagatgggggggtctcatcatgttgcccatgctggtctcaaactcctaggctcaaatgaccccagtgacttggcctcccaaagtgctgggattacaggcgtcagtcactgtaccaggtcctgagacaatatttttgagattcatttatattatttcacataacgataattagttcggtttccttgctagatgatatcccattgtatgtactgtgggcattgcccttgacatagaacagtaaatgaatcatccttctggccgggcgcggtggctcacgcctctaatcccagcactttgggaagccgaggcgggtggatcacgaggtcaggagatcaagaccatcctgactaacatggtgaaaccccgtctctactaaaaatacaaaaaaaattagcagggcgtgggggcaggcgcctgtagtcccagctacttgggaggctgaggcaggagaatgccgtgaacccaggaggcggagcttgcagtgagccgagatcgcgccactgcactccagcctgggtgattgagcaagacggtctgtctcaataagtaagtaagtaaataaataaatatataaattctccttcttttttttggagacgatctcactctgttacccaggctggagtgcagtggtgtaatcactgctcactgcagcctctacctcccgggatcaggtgatcctcctgcctcagcctcctgagtagccgggatgacaggtgcacaccaccatgcccagctaattttttattttttgtagaaatgggcaaggggagtctcaccatcttacccaggctggtctcaaacccatgggctcaagcgatcctcctgcctcagcctcccaaagtgctgggattacaagtgtgagccaccaagcccagcctgttatgaactttttttttttttttgacagggagtcttgctctgtcacctgggctggagtgcagtggcgcaatctcggctcactgcaacctccgcctcctgggttcaagcgattctcctgcctcagcctcctgagtagctgggattacaggtgcgcgtgccaccacccccggctaatttttgtattttttgtagagatggggtttcactgttttggtcaggctggtctcgaacccttgacctcgtgacctgcctgcctcagcctcccaaagtgctgggattacaggcgtgagccactgtgccgggtctgttatgaattttttgaggccaaagaagatgttggatgtatctccttctctcccactttacctccccggacataatggatgctggatacatatgtgttacttgaaggaatgtcctgggtgttcttgttctcaaggagacaggttgccttattacaaggcaaccattcgcagcacttatgataaaacaggagctttaattgctgaggttacagtgcagcctcaccccctccacccattctctatctttactaccaagcatagtttgccctgtgacctctctctgtgatatattttctacttatcattgcttccaataacactttttctgagtacatctgtctcttggtcccagagacgtgggtgtctcctaaattgctcctcccaggaaataaatttctaatagctttcttgatagattcaatccaaggtgacatttatcttgtagaggcatatgctggtgttaatatcacatgtgtacattgtttccaactagcaatgtcctgtgaactttatctctgtcacctgtgcaatggattaactgacagaacagcgaactgaaccctttggaaagcaatttaaccctatcgtgagcgcgctgtgactcagcagttgggatcgtgggcatgtgacttagagagactcttgcctgtgtgcaaacgggagactcacacaataatgttctcaatggcaaaaatttggaaagtacacagagtccattgatgggagaatggaaaaatacgtcctagtgcagtcccacagagaaatatgatacagcagaaaattcctaagtgacaacagcataaaagaatcttagttagtctcagctacttggaaggctgaggcttgaggattatttgagcccaggggttccaggaagacctgggcaacatagggagaccccccttctctaaagaaaagaaaaaggcgggctgggcgcggtggctcacgcctgtaatcccaagactttgggaggctgagatgggcggatcaccaggtcaggagattgagaccattctggctaacacagtgaaaccccgtctctactgaaaaaataaaataaaataaaataaaataataaaaaaattagtcgtgggtggtggtgggcgcctgtagtcccagctactcaggaggctgaggcaggagaatggcatgaacccaggaggcggagcttgcagtgagccaagatcacgccactgcactccagcctgggtgacagagcgagactccgtctcaagaaaaaaaaaaaaaaaagaaagaaagaaaaaggctggatgtggtagctcacgcctctaattctagcactttgggagggcgaggcaggcagatcgcctgaggtcaagagttcgtgacaagcctgggcaacatggtaaaaccctgtctctactaaaaatacaaaaattagccaggtgtggtgatgcacatttgcagtcccagctactcagaaggctgaggcaggagaattgcttaaactggggaggcggaggttgcagtgagccaagatagcaccactccagcctgggagacacagtgagactcaatttaaaaaaaaaagaaaaagaaaggttataaaagactataatgccatttttattttttaattaattttttttaaagagacagagtcttgctgtgttggccagtataagcttgacctccaagcctcaagccatcctcccaccgggaccttccagaatgctgggattacaggcatgagccaccccacctggccttatgacaaccttttttttttaaattaatttatttatttttgagatggagtcttgctcttttgcccaggctggagtgcagtggtgcaatctcggctcactgcaacctccgcctcctgggttcaagcgattctcatgcctcagcctcctgagtagctgggattacaggcatgtgccaccacgcccagctaatgtttttgtatttttagtagagatggggtttcaccatgttggccagactggtcttgaactcctggcctcaagtgatctgcccgcctcggcctccaaaagggctgggattacaagtgtaatcaagtgagccaccacgcctggccttatgacaccatttttataaaatgaaaatggctcagtgttattagccattagagaaatgcaaattaaaaccatgatgagatacttccatacgcctattagaatggctaaaataaaaatactgaccaggcatagtagctcttgcctataatcccaacactatggtaggctgaggcgggaagatggcttgaggtcaggagttccagaccagcctgggcaacatagtgagatccttgtttctatgaaaacaaacaaaaaaaaacttagctaggtgcacacctgtagtcccagctacttgggaggctgaggtgagaggatcgcttaggcccaggaattcaaggctgcaatgagctatgatagtgccactgcactccagcctgggtgacagagcaagaccctgtctcaaaaggcaaaagaggctgtgtgaggtggctcacgcctgtaatcccagcactttgggaggctgaggtgggtggatcacctgaggtcaggagttcgagaccagcctggccaacatggtgaaaccccatctctaccaaaaatacaaaattagccaggtgtggtgccaaacgcccgcaatcagagctactcgggaggctgagacaggaaaatctcttgaacccagtaggcagaggttgcagtgagccgagattgtgccactgcaccccagcctggacgacaagaacaaaactccgtctcaaaaacaaaaacaaaatttggccgggcacagtggcttgcacctgtaatcccaacattttgggagcacaagtaggcagatcgcttgagctcgggagttggagaccagcctgggcaacatggcaaaaccccgtctcagccgggcgcggtggctcacgcctgtaatcccaacagtttgggaggccaaggagggtggatcacaaggtcaggaaatcgagcccatcctggctaacacggtgaaaccccgtctctactaaaaatacaaaaaattagccgggcgtggtggcgggcgcctgtagtcccagctacttgggaggctgaggcaggagaatggcatgaccccaggaggtggaggttgcagtgagccgagatcgcgccactacactccagcctgggtgacagagtgagactccatctcaaaaaacaacaacaacaacaaaaacccgtctctagaaaaaaaaaattatttgtgtgtggtggtgcatgcctgttgtctcagctactcaggaggctgaggcaggaggatcacttaagcctgtgaggtcaaggctgcagagagctataatgacaccactgtactccagcctgagcaggagagcaaaaccctatctcaaagagaaaaaacaaaaacaaaaaaaaaccagcaacgaaaagattaagatggtaaattttttgatatacatgtatttaccacaattttaaaaagattagggctgggcgcggtggctcacgcctgtaattctaccactttgggaggccgaggtgggggaatcacgaggtcgggagttcaagaccagcctggccaatacggtgaatccccatctctactaaaaatacaaaaactagctaggcatggtggctcatgcctgtagttccagacactcgagaggcagaggcaggagaatcgcttgaactcaggaggcggaggttgcagtcagccaagattgcgccactgcgctccagcctgggcaatagagattccgtctcaaaaaaaaaaaaagaaaaaagaaaagaaagattatacataaattatagaaaaggaaaagtgcaccttataacgtttagggatatgaacacatgattaattgaatttcgtgaagtctgtgagttcctggaatgccgggaactcatccatcttggcatccctggctgccagcaccaagcctgacacacgggaggtgtttggtgagcacagatgtgagcaatgaatgtggctgccttggggacctcgtggcatggtggcagtgtgcaacctgcaggggtttggggcaaacatacctggctcaaagcctggtgccttggatcactggatgttctcatcctattccagtgagttcccgatgaaacctctcttgctctcagcctgtggtggagctcccagggtagttctaatctgaaactttggaagaaaccaatctgagctttcttccagagctgcagctgattaacttaacaacctggggtgcagtgttcaaggaggaaaacaggatgctctgagagaagcttagcagtgctgtgccaaagccagctccttctggtgggcaagagccgatttgttcaagttttgggaaatttgggaactgctggttaatagctacgatttcaaattaggccaggcgcagtggctcacgcctgtaatcccggcgctttgggaggttgaggcaggcagatcacaaggtcaggagtttgagaccagcctgggcaacatggtgaaatcccgtctctactaaaaatacaaaatttagctaggcgtggtggcaggtgcctgtaatcccagctactgggaaggctgaggcagaggagttccttgaacccgagaggtggaggttgcagtgagccgagattgcaccactgtactccagcctgggacagaccgggactctgtctcaaacaaacaaacaagcaaaaattaggccaggagcagtggctcgcccctgtaatcccagcactttgggaggccgaggcgggaggatcatttgaggttaggagtttgagaccagcctggtcaacatggtgaaacctcgtctctactaaaaatagaaaaattagctgggagtggtgttgggcacctgtaatcccagctactcgggaggctgagacgggaggatggtttgaacccgggaggcggaggttacagtgagcggagttagcgccattgcactccagcctgggcaacaagagtgaaactcttaaaaaaaaaaaaaaaggaataaggaaatattttccagtattcagaaatgattatgtgattcatcacagaagtcatccacatttttgatgaccaagtgaagttctttttttttttttttttaatttgagatggagtctcactctgtctctcaggctggagcgcagtggtgccatctcggctcactgcaacttctgcctcccaggttcgagtgattctccctgcctcagcctcccaagtagctgggattacaggcacctgccatcacaaccggttaatttttgtattttttttttagtagagacggggtttcaccatgttggccaggcttgtctcgaactcctgacctcaggtgatctgcccgccttggcctcccaaagtgctgggatgacaggcatgagccaccacacccagctggtttctagagtttctttctttttttttttttttttgagatggagtctcactctgtcgccaggctggagtgcagtggcgcaatctcggctcactgcaacctccgcctcctgggttcaagtgattctcctgcctcagcctcccgagtagctgggactacaggcacatgccaccacgcctggctaattttttgtatttttagtagagacagggtttcaccatgttggccaggatggtcttgatctcttgaccttgtgatgcacctgcctcggcctcctaaagtgctgggattacaggagtgagccactgtgcccagcctagagttgttttatgactttgtgccacgtcctggccgatggatgctcatgatgacatttattttatcgctctgcaatcaaagatttgtgcagatgaatgggaactgcgagagaacatgggaaaatgaaaggggtttaattgcgggagggaaggaaaacacataaaatgtattttttcgctttcccatgatttatttatttatttttattattattatattttgagatagagtctcgctctgttgcccaggctggagtgcagtggcatgatctcggctcattgcaacctctgcctcctgggttcaagcgattctcctgcctcagcctcccgagcagctgagattacaggcatgtgccaccaaacccggctaatctttgtatttttagtagagatggggtttcgccatgttggccaggctggtctcaaactcctgacctcaggtgatccgcccacctccacctcccaaattgctaggattacaggcgtgagccaccgcgcccggccttaccaagttctgattgaagtgaaatgcctggaagaaagataaagttaaaatgaggttttcacaacatgtcgaaatcactctgagcaaagttccaaacccaaggttctagaaagtgcaatgacttttttttttttaaacaggggcaattaaaaatttcccaggcttagcaagatcaaatgggtgtgtgcagcgctctctctgacatgcaatttatggaattattgatttgtcaatgtgatctctgcacttcctgtgaggaatttgaggtcctgtttggagaatttggtaaatagggaatctcgcagaaacatggggtcttgagaaactcatttcaaccctctgagcctcagtttccacttttctttttttcttttcttttctttttttttttttttttgagacggagtctcactctgtcacccaggctggagtgcagtggtgcaatctcggctcactgcaagctccgcctcccgggttcacgccattcttctgcctcagcctcccgagtagctgggactacaggcatccgccaccacgcccggctaattttttgtgtttttagtagagacggggtttcaccatgttaaccaggatggtctcgatctcctgacctcgtgatctgcccacctcggcctcccaagtgctgggattacaggcatgagccaccgcgcccggccttcacttttctttttttagaaagacagggtgtctgtcactcaaattggagtgcagtggcatgatcatagctcaccacggcctctaattcctgggcttaagtgatcctctcaccttagcctcccaagtagctgagaccacaggcatgtgccaccatgccctgctaatttttaaactttttgtagagacaggtttcactttgtttcccaggctgatctcaaactcctgggctcaagctatcttgtcaccttggcctcctaaagtgctgaggttataggcgtgacctattatgctggcaataaaataatttaaaacaaattttttagagacaggatctcacctggcacccaggctggagtgcggtggtgcagtcatagctcaccgcagcttccaactccttggctctggtgatcctcccacctcaagcccctgagtagcctggactacgggcacttcccaccatgcctggctaatttttaaattttttgtagagacagggactccctgtgttgcctaggctgatcttgaactcctgtgctcaagcaatcctctcacctcagcccctcaaagtgctgggattacaggcgggagccaccatgccccggccataaaatcagtttttaactcaggctgtacaacaataggcagtgagctgtgggctctaatttgcccaccgcaatacaggctgtgattatattgggaggcatttgggacatgaaacatggtcatgtttgtttgttttgttttgttttgcttttggccttgttctttttttgttttgttttgttttgttttgttttgttttttcagagagtctcgctctgtcacccagactggagtgcagtggcgagatcacggctcactgcaagctccgcctcctgggttcacgccattctcctgcctcagcctcccaggtagctgggactacaggcacctgccaccacgcctggctaatttttttttgtatttttagtagagacggggtttcaccgtgttagccaggatggtttcaatctcctgaccttgtgatccgccccccctcggcctcccaaagtgctggaattacagtcgtgagccaccgcacccggccagccatgttctttattatcaaactactgtgagtcacttttcttaaggttcattgatttgacacatttttattgaaaccctactaagtgccaggcattggatgagacaaaacccctgccctcacagagtttacagtctgggggagaaataggccacagataagatgccaggaagagccacagagatgaaaaaagtggggaaggagcttaggtgcagtggttcatgcctgtaatcccagcactttgggaggctgaggtgggaggatcacttgagtccaggagttccaggctagccaaggcaacatagtgaaaccttgtctaaaaattaaaaataaaggccgggcatgatggctcacgcctgtaatcccagcactttgggaggccaagacaggcggatcacctgagtcagaagttcgagatcagcctgcccaacatggtgaaacccagtctctactaaaagttacaaaaattagccgggcgtggtggcaggtgcgtgtaatctcagctactcgggaggctgaggcaggaaaattgcttgaacccaggaggcggaggttgcagtgagccaagatcgcaccactggactcctgcctgggcgacaagagcgaaactctgtctcaagaaaaaagaaaaaagaaaagggaaggaaggggatagaactgtggaagcagagagttgaggaaaggttggagttttagtttttgttttgttttttttgagacaatcttactctgtcacttaggctggagtgtagtggctcgatctcggctcactgcaacctccacctcctgggctcaagtgattctcctgcctcagcctcccgagtagctgggactacaggtgtgcaccaccacgcccagctaatttttgtatttttagtagagacagggtttcatcatgttgccaaggctggtctcgaactcatgagctcaagcagtctgcccacctcagcctcctaaagtgctgggatgggaggcgtgagccactgtgcctggccaaggttgcagttttaagaagtctgttggggtgagtctcattgaaaaggtgacatttgggcagaggcgggagtgtaccccacagatatcagggaaaggttttgaagcagagggcacagcccatgcaaaggccctgaggcaggagcacgcttggtgttggaggagcagtaaggaggcctgtgtagctatagcagagtgagcaagggggagagaaggaggaggggaagatggggagggggtaggggtagaggacagggcagatcatgcagcacattgtggaccatagggaggacttgggcattgacctccaaggaggtgggagccatagaagatttccggcagaggagggacaggctctgactccggtgctcacgggcgccctctggtgtctgctgcagggaagacaagtttgcaggacgagaatgggagctgagaaaccagggtggaggagagtgggctggtccaggccggctaaggagaggctgcgccaggtagaaggatgcattttgaacatggagcagacaagactttcctggtgtagagttttgcaggtatgagagaaaaactcagggataagaaatttggacctgacccctctggaaggatggtgcttctgtttgtaaaatgggaacgacagaccaggcgcgatggctcacacctgtaatcccagcacttcgggaggccgaggtgggcagatcaccagaggtcaagagttcgagaccagcctagccaacatggtgaaaccccttctctactaaaaatagaaaaaaaataggtgggcgtggtggcggacgcctgtcatcccagctactcgggaggcagaggtgggagaattgctcgaacctgggaggcggagttgagatggcaccactgaactccagcctgggcaacagatcgagactccatctcaaaagaaaaaaaaaaaaaagaaactttccccatggcagaagaaagactgggaggttaggtagttccggctgcagtagagaatgtgagtttctcataagatcctctagagggagccgggagctaggacgcaggtccagcctcttatccggagtcctcctcgtatcccccatcccccagcaggatgggcctgggtgggaaaagtggtggggtcagcaggggtggtctttgtctttgcaacagggaaggccctgtctacccttccagagttgggggcttggaggagaggggatgccaaattcgcacaggggttagcaaactttttcctaaagagccgtataataaatacacacacactaaataaatatatacacagtttaggcggggtgcagtggctcacgcctgtaatcccagcactttgggaggccgaggcggggggatcacttgagatcaggagttcgagactagcctggacaacatggcgaaacccagtctctactaaaaatacaaaaattagccaggcatggtggcgcgtgcacctgtagtttcagctacttaggaggctgaggcaggagaatcgcttgaacccaggaggtggaggttgcagcgagctgagatcgtgccactgcactccagcctgtgcgacagagactctgtctcaaaacaaaacaaaacaaaacgaaaaaacacacacacgcacacacacaaaaaaccacccagcttaaactctgtctgttgcagctcctgaaatctgctctcgcagtttgcaagaggccttagataacctgtacgcaactgggcatggctgtgtcctaatacagttttatttttagaggctgaaatgagaatgtcacataattttctgtgaatgctaccgctaccatgaaataattcttttttttttctttttttttttttggagacggagtctccctctgttgcccaggctgtagtgcaatggtgcaatctcggctcactgcaacctccacctcccgagttcaagcggttctcctgcctcagcaagactccatctcaaaattaaaaaataaataaacatataaataaaagttgcctaatctagaacctcctacaggcaacagtagctgcctggaatttaacaatgttgtttatttatttatttatttattttttgcttctgtttcaggcaccagatactacatttctttttaatttactctagcattataatgtttccttttacaaaagttgttgagaaggagtcttgctctgttgcccaggcaggagtgcagtggcgggatctcggctctctgcgagctccacctcctgggttcacaccattctcatacctcagtctcccgagtagctgggactacaggcgcccgccaccatgcccggctaattttttgtattttttttttttttagtaaagacagggtttcactgtgttagccaggatggtcttgatctcctgacttcgtgatccacccacctccgcctcccaaagtgctggcattacaggcatgagccaccacgcccggccaaccttcattttttttcaataaatttattttaaaaagaaaactttgtaacaggataataaattgaaaccaataatggatacccaaaatagaagggaactgtaaaaatacatgcaatggccgggctggcgcagtggctcacgtctgtaatcccagcactttgggaggctgaggcaggtggatcaacacaggtcaggagttcaagagcagcctggccaacatggtgaaaccccatctctactaaaaataagaaaaattagctgggcacggtggcgggtgcctgttgtcccagctactcgggaggctgaggcaggagaatcgcttgaacctgggaggtggaggttgtagtgagccgagatcacgccactgcactccagcctgggctacaggtgagattctgtctcaaaacaaaacaaaacaaaacaaaacaataacaataacaaataaataaatgcaatgtttactgttcttaagattattattatttctttccttcttttatttttttgagacagtctggctctgtcgcccaggctggagtgcagtggtgtggtctcagctcactgcaacctgcacctcccaggttggagcaattctcctgtctcagtctcctgagtagatgggattacaggcgtgcaccaccgcgcctggataatttttgtatttttagtagagacggggttttgcaatttaggccaggctggtcttgaactcctaacctcaggaatatcctcctgccttggcctcccaaagtgctgggattacaggtgtgagccaccacgcccagcctgccagggattaaacattaacgtcaatatttgagctggcaggggctttatattaccttcacatctatccccacatttcatagaccaagaaacagtctgggagagaagcaactctctggcatcacaagtttgctgctgagctagggataggactctctttctctctcttttgagacagggtcttgctctgtcacccaggctggactgcagtggtgccattatataccactgcagcctcaacctcctgggctcaagcaatcctcctgccttggccccctgagtagctgggaccacaggcatgcaccatcacacctggctaatttttgtattttttgtaaagatgggatcttgctgtgttgcccaggctggtcttgaattccttggctcaagtgatctgcccgcctcagccccccaaagtgctggcattataggcatgagccaccatgcctgcaccccaccccagattttttaattagctgagctaggtggcatatgcctgtggtcccagctactcaggaggctgaggtgggaggatcacttgagcctggagtttgaggctgcagggaggcctgggtgacagagggagaccctggctgaataaataaataaatagccttgcgcggtggctcacgtctgtaatcccagcactttgggaggccgaggtgggtgggtcacctgaggtcaggtgttcaagaccagcctggccaacgtggtgaaaccccgtctcttctaaaaatacaaaaattatccaggcatggtggcttatgcctgtagtcccagctactcaggaggctgaagcaggaaaatcgcttgaacccaggaggcagaggttgcagtgagccaaaatcgtgccactgcattccagcccaggcaacaaagtgagaccctgtctcaaaaaaaaaaaaaaaatagtagggttacatgttgggaaatttaggtacagaatcagatacgcgcaggaaggtagataatgtgaagtgagactcagggagaaggaagcatgtatcggccaagcagaaagacctcagaaggaatgaacccttggccacatgtggtggtgaacgcctgtaatcccagctacttgggaggctgaggcaggagaatcgcttgaacccgggaggtggaagttgcagtgagttgagatggcaccactgcactccagcctgggcaacaagagtgaaactccgtctcataaaaaaagagaaggaatgaatcctgcccacaccttgatcttgcagactagatagggaagcccagggatacttcagttcttggggcctggaaatgctgtcctcctcaacccccaggccaaccccggtagggtggagcggaggagacaccccctgcccctgccctgtttcctcctccaccaacgggaaggatgccagtgggggcctcctgtgcctccttttccaggtgagagggtccgctgtgacccttggacctaccagccataaagcaatcaccgggaggaggtggtggcgagactgggaggtgcggactggactgaggggtgtggatcaggagatgagacgggttaggtgctgactctcggtaccgtcctgcagacaacctgttcccctgaaactggtggacagactttctttttttctttctttctttttttttctttttctttttgagacagagtctcactctgttgcccaggctggagtgcaatggcgtgatctcagctcactgaaacccctgcctcctggttcaagcgattctcttgcctcagcctcccaagtagctgggattacaggtgtgcgccagcacgcccagctaattttttgtatttttagtagagatagggtttcactatgttggccagtctggtctcggactcctgacctcaggtgatctgcctgcctcggcctcccaaagtgctgggattacaggtgtgagccaccgcgtccagcctatttacttcttatacaggaatggtttcattcagcatcttcctctcgtgggtggggagtggggaatgtctcctcagtcttgctccctgttggatcccagcacccggcacacagcaggtgctcaataaataacagttacaggaatgaatgaatgaatgaattctcaagcacagtgtcctccattctttaagaagggcagagcgagtcccccaaactcacaggatttggaggccctggctccagtgttctgtcttcacccacccctctgagagcagaggctggaactcctgggatccacccaggacatcagaggagagttggatgcctggagggtcaggtcctaatcaatgtcatcgcccgtgaggccggccagagtccccctgtggcctcccagcctctggctggcccctggcacacccacatcacaagggttttactcactgcctggctgtattacaagggagggaaggggaggagggggaggaaaaggaggaggaggaggagggagggaaggggagacgggagaggagaggaaggggaggagggcaagagggaggaggaggaagggaggagggaggggggaaggggaggagtgggaggaggagggagaagagaggaggagggggaggagggaaaggaggagggagaggaatggggaaagaaggggaggaggggaggatgacgggggagtggaaggagaaggaaggaagcacggaggagtgggaggaagaggagaaggagaaggaagggaggagggagaggagaagggggagaagggagaggtggggaggaggggaagagggggagaagggggaggtggggaagaaggaggagggtgagagagaggaggagggaggaggctgaggaggagggagaggagggagagaaaaagaaggagggagaggagtggggaaggaggggaggatgagagagaggatggggaggggaaggagaagagggaagggagcagggaggaaggggaggaaagagaaggggaagaggagagggaggaggagggaaaaggccaaggaggagggagcagggaggaggaggaaggcaagaggaacagaatggagagggaggagggagaggaggagtgggagctgctgccctcctggacccactcactttttccaccgggaactggcccacaagggtggtgctcaaggaccccagggcaagtccccccgaccccgcatctgtagcaggggacctgggtgttgtcagttctcctgcctgactcatgcaatggccaagtgagtcacatccccttatcagctcctctgtcctcctgtgcagaatggggactgtccttacgatcagagctgtgcagaggccaaagggctaaggcaaccaggaagggacagccgggcatccgctgggcgtcacgggactgcagtcagatagatttcttttttcttttttttttttttgagacggagtcttgctctgtcgccagtctggagtgcagcggcaaaatctcagctcattgcaacctctacctcccgggctcaagcctcctgagtagctgggattacaggcatgcaccactgcgccctgctaattttgtatttttagtagagacggggtttcaccatgttggccaggctggtctcaaactcctgacctcaggtgatcctcccacctcggcctcccaaagtgctgggattacaggcgtgagccacctcacctggccagaagtccctttttagcgctttccgtgggaatgctcccacatgtggttcgtcctttatccctggctttacacatgaggaaactgaggcagggggaggcagtcgtttgcccacagtcacaggggggcaagtggcagagccaggattctgtccaatagaccatgtagacttttttttcctttttgagatggagtctcactctgtcacccaggctggagtgcagtggtgcaatctgggctcactgcaacctccacctcccgggttcaagcgattctcctgctttaccctcctgagttgctgggattacaggcgcctgccaccatgcctggctaatttttgtatttttagtagagacggggtttcaccatgttggccaggctggtctcgaactcctgacctcaggtgatctacctgcctcggcctcccaaagtgctgggattacaggcatgagctcctgtgcccagctaatttttgtatttttagtagagatgggttttcaccatgttggtcaggctggtctcagactcctcacctcaagtggatcgcctcagcctcccaaagtgctgggattacaagcgtgagccaccgtgcccggcccacgtagacttttatttattcacttatttattgtttatctccacgttcctgaggtatcctcttaagttttccagcagctatattttaaaagttcaaggcaaaattaaatttcacttaaaaaatatatttgtggccgggcgcagtggctcacgcctgtaatgccagcactttgggcggccgaggtgggaggatcacgaggtcaggagattcagaccatcctggctaacacggtgaaaccccgtctctactaaaaatgcaaaaaattagccgggcatggtagcacgtgcctataatcccagctattcgagaagctgaagcaggagaattgcttgaacccgggaggcagaggttgtagtgagccgagttcgtgccattgcactccagcctgggcgacagagcaagactccgtctcaaaaaaaaaaaaaaaaattaaataatgatgaactcttgctcgtttgatgacattgtattttttgcgcaatgggaaactcctgtggttcccgggacagcacgctgttgtatgttctgctgggtgggtttatgagaattgacaacagtgtgcaaacacattgggcaatgcagggctttatacagggacgtgttccattgtcaagcttttattgactttaccacttggctcaaaacatgggaagggccaggtgtggtggctcatgcctgtaatcccatcactttgggagaccgaggcaggcagatcacctcaggttgggagttcaagaccaacctgatcaacatggtgaaaccccgtctctactaaaaacacaaaattagctgggcgtggtggcgggcgcctgtaatcccagctactcaggaggctgaggcaggagaattgcttgaacctgggaggcagaggttgcagtcagccgagatcgcagccattgtactccagtctgggcaacaagagcgaaactcagtctcaaaaaaaaaaaaaaaagagggtttggcgtggtggctcatgcctgtaatcccagcactttgggaggctgaggtgggaggatcacttgaggccaggagtttgagaccaacctgggcaacatgaagaaacctcatctccacaaaaaaatacaaaaattagccaagcgtggtggcacgcacctgtagcctcagctacttgggaggttgaggtgggaggatcacttgagcctgggaggcaaaagttgtagtgagccaagatggcgccactgcactccagcctgagcgacagagtgaaaccttgtatcaaaacaaacaaacaaacaaacaaacaaacaatgatgtgttagcaataaagtgacagagagtctacagagggaacatgtacttaaacacattgctgaaaatgactgcaggaattttactttagattccaagttattgtccctttgagatacgtagtcgtgttcagtggataaactgctatgaggtcaatggcagtgaaaagtccttctgtccccacaagagcttctttttcttcttcttcttcttctttttttttttttttttgacagaagctttctctgtggcccaggctggaatttagtggcgtgatctcggctcactgcaacctctgcctcccaagttcgagtgattctccagcctcagcctcctgagtagctggcattacaggcgagtgccaccacgcccagctaattcttgtattttttagtagtgacagggtttcgccatgttgggcaggctggtctcaaactcctgacctcaggtgatccgcccacctcggcctcccagagtgctgggatgacaggcgtgagctaccatgcgggccaagtgcttattcttatcctccctgttaacagatacctgaaatcccttcattgaggtgtacaaaaggcttctaaagttcataataataagtattgttatttttgagaaaaagtctcgccctgtggcccaggctggtgcagtggtgcagtcacagctcatggtagcctcaaactcccaggctcaagcgatcctcctgcctcagcctcccaagtagctgggactacaggtgtgcaccaccatgcttggctaatttttttttttttttgagacggagtcttgctctgtcgcccaggctggagtgcagtggcgcgatctcagctcactgcaagctcggcctcctgggttcacgccattctcctgtctcagcctcccgagtagctgggactacaggtgcccaccgccatgcccagctaattttttgtatttttagtagagacggggtttcaccgtgttagccaggatggtctcgatctcctgacctcgcgatccgcccgccttggcctctcaaagtgctgggattacaggcgtgagccaccatgcccggcccttttctttttgatagagggtcttgctctgtcacccaggctggggtgcagtggcatgatctcggctcactgcagtctccacctcctgggttcaagtgatcctcctgcctcagcctcccgagtagctgggattacatgtgcccgccaccacatctggctaatttttgtatttttagtagagacgcggtttcaccatgttggccatgctgcctggctaattttttaaacttttttgtagttatgaggtcttgctctattgcccaggctgatcgggaactccagggcttgagcaatcttcccgcctcagcctcccaaagggcttggattaccggcatgagccacggtgcccggctccagcaggttttgataagagaagggggagtgatctctctcgagggcactagaactcccaagagtgataaacggggtgaggagaggcagagaggagtccagaagtcaaacatcacctacttgatccacccactgtgatggccctggaaaaaagcctccacggcaaatgctgaataaatattatgactgggatcactaaagccaagccaaggcaaacaacccctctaaaatccaacacagagcagataaaaggagatcagaaaaatgtagaggtcaagggcgagataattctagtagcacccagacagggacaggtaccgttatcggggtctcttcttgggccccgtggagcttggggacccggatccttctatggggtggggccatcctgggcactggaggttgctgagcagtgtccctggcctccacccaccccgcgccagggccacccccctttgttgtaacaaccacagatgtcctcagacatcacccagtgtcctcgggggagtgtaaaatcaccctgggtgagctcccctgggttaggggattccatggacccccaagagactgtatcccgtgatgctctgccctgctgaggtcccaggaggctgcacacattgaaatccatgccctgaatggggaaggagggaggaggtgaatcccaggatctggggttcccctggtttataccgtctgccctgttgggagtttattctggtgtctggtgtgagcagggaacccactcaattttttcccaaataattaatgcagtctttctcccccagatcccgtggctgtggggcaggattgctttctggggtggggccgtcctgggcactgtagggtgctgaacggcatctctggccttcacccattctatgccaggagcatctcgcactcgtgacaaccacagatgtcccagacattgcacagtgagtgtcctgagtttccgtccggaaggttgaggctgcagtgagtttttttttttttttttgagatggagtctcgctctgtcacccaggttggagaacagtggcaccgatctcggctcactgcaagctccgcctcccaggttcacgccattctcctgcctcagcctcccgagtagctgggactacaggcgcccaccgccacgcccggctaattttttttttcgtatctttaatggagacagggtttcaccgtgttagccaggatggtctcaatctcctgacctcgtgatccacccacctcggcctcccaaagtgctgggattccaggcatgagccactgtgcccggcctgctgcaatgagttttgatcacagcactgcactccagtctgccctagtggagggcaagtgcagtaatgtgagttagtgttggataaaagaaccatatcgtgtgtggcatatggtagccccttattgaattttgatttcatgaatacatatgagtgatccattgaaaaatataaaccaggccgggcgtggtggctcatgcctgtaatcccagcactttgtgaggccaaggcgggtgaatcacttgaattcaggagttcaagaccagcctggccaacatggtgaaaccccatctccaccaaaaatacaaaaattagctgggtgtggtggtgggagcctgtaatgccagctactcaggaggctgaggcaggagaatcgcctgaacctgggaagtggaggttgcagtgagctgagattgtgctactgcactccagcctgggcgacagagcgagactctgtcttgagaaagaaagaaagaaagagagaaagaaagatagagagagaaaagagaaaaaaagagagaggaaagaaggaaggaaggagggagggagggagggagagaaggaaggaaggaaggaaggaaaggaaggaaggaaggggaagggaaccaggatgtgaatttttttagagcaaggagggcacataaattacccctctcaacctagcacatggcacagtgtccagcaaacagaaagcttgatttagtctcctatttgctaaacttccaacagtgccctgctgtttagcacaaaccaaactccttgccacaacacacagggctttgcacgacctgccccgtcccctccctgccttcccctcctccctgccttcccctcctccctgtcttcctctcctgcctgtcttcctctcctcactctgctccagccacaggggtctcattgctgttcctccaatgcgctaggcacggacctgcctcagggcctttgcacaaactgtgcctctgcctgggacacctttccccagaccttcccagggccagttccatctcatccttcaggactgcactgaacatgtcattttttttttttttgagacagagtctcactgtcgcccaggttggagtgcagtggtgtgatctcagctcactgcaacctccgcctcctgggttcaagtgattctcctgcttcggcctcccgagtactggtattgcaggcatgtgctaccacacccatctaatttttatatttttagtacagatggggtttcaccatgttggccaggttggtctcaaactcttgacctcaggtgatccacccacctcggcctcccaaagtgctggcattacagatgtgagccaccacgcttggtctaatatgtcatctgctaaagggggactttgcctgggcacagtggctcatgcctgtaaatccagcactttgggaggctgaagcaggtggatcatttgagcccaggagtttgagaccatactggccaacacagtaagaccccatctctataaaaaaaaaaaaacaaaattagccaggtgtggtggtgcacgcctgcagtcctagctacttgggaggctgagacgggaggatcacttgaacccaggagttggaggctgcagtgagctatgatcctgccactgcactccagcctgggcaatagagtgagaccctgtcctccaccaacaccaaaaaaaaaaacaaaaaaacaaaacagggctcctctctcttggtagggggtggaggggaggtcagagacacctctcagccacccgggctgattcacaaatatcgaacattcactaaaatgtcaatacagtgacctagagccagaggggaagagggagggtacaagaggagagttccaggcagaggggcgagcaggtgagtaggtgcaaaggccctaagcaggaaccagtttggctccataaatatttgttgactcaatgaacgatagaagattctagagagaattgattgcacagaatcacccatggggactcagaggcggagtccaagctggtttcggagggggctgggggccggaggttggcaggtggggtgaaggatgggagccgctagctgctggcaggaaaactggcttcagtgaagatctggtctggtcctcttggtttgtttctgtccagggagtggacaggacccatgtaagggccctgggctatcccagaacccatctgggaattctgaagagaaaaagtcctgtaactggccgggtgcggtggctcacgcctgtaatccccgcactttgggagactgaggggccgatcacgaggtcaggagttcgagaccagcctggaaaacatgatgaaacctcgtctctactaaaaatacaaaagttagccgggcatggtgatggggacctgtagtcccagctactcgggaggctgaggcaggagaatcacttgaacccaagaggcagaggttgcagtgagccgaaatgagatggcaccactgcactccagcttgggccacagagcgagactccgtctcaaaaaagaaagaaaaaaagaaaaagtcctcataagtagggcagaggtcacggcagagtggaggtaccccagacttcgacctttgctcactgagggctggaaaaccacaaaacacccagataacggtcttccctcccctgctcctgcctgccccagtgtcactggccctcaaccctgtctctccaccctgtccaccaatcagcacctggaggtgggctgggagctgcctgtgaccgcttcagcatcttttgggagtggtgacagagccacagagggctgtgagcttgcccggccccaggtaacgctggcggtgggtgggcctccagcttggagcagagaccccccgaggcatctgcagacagaactggatggacccatgaatacggatttagctgctggaaaggtgagccctactaggtccccagggagagcgggagtctaggctgggaaagcctacccaagctgccagagctggaaggaccccatctccacccctattgtacagatgggaagactgaggcccagagaaaggatgcaatgagcaaaactgtgtgcctttgccccggggctgcccttgtctttcttccaggtccccctgcctcctaggagcgggcacttggggaggctgtgaaggcctgagaggcaagcggcatctctagctagggcctctctccagcactttttattttattttattttatttttatttttattttttgagatggagtctccctctgtcacccaggctagagtgcaatggcacgatctcagctcactgcaacttccacctcctgggttcaagagatcttcctgcctcagcctcccaagtagttgggattacaggtgtgcaccaccacgcccggctaatttttgtacttttcctagagacagggtttcaccatgttggctaggctggtctcaaactcctgacttcaggtgagctgcccgcctcggcttcccagagtgctgggattacagatgtgagccaccgtgcctgccatacttttttgttttttgaaacaaggtcttgctctgtgacccagggtggagtgcagtggggtggccatagctcactgcagcctcaacctcctgggttcaagggatcctcctacctcagcctccccagtagctgggacgacaagtgtgtgccaccgcagccagctaatttttttaaattatttgcagtagggataggggtctctatgttgcgcaggctggtcttgaactcctgggctcaagtgatcctcctgccccggcctcccaaagtgctgagattacaggcatgagccaccacatccagcctctccagcactttaagagaaattggctctcacactgtggaattctctctatcagcctcaaagtccagatttggaaagggagtctcagcgaggggcagcagctggcccaacccggaggcagagcggcaactgaactctagccggaaagagccagggttatgtgcacatgggaggtggggaggacaggggctgtatgtgaccctcacatctgttcctcgcgccccagatggcttctgctgcctgctccatggaccccatcgacagctttgagctcctggatctcctgtttgaccggcaggacggcatcctgagacacgtggagctgggcgagggctggggtcacgtcaaggaccaggtgaggagtccactgcagttgccccgggaccacagagctccaggcgggccaactgaggccccacgaaggtgctagacccgccagagcccagccagagctctgctcagctctacgatgcactaatgggtcacggtgcttgattttagccaagcacatcatttagcgggtagcatcagctccttcttacaggtggggaatggaggcccagagcagggtggaaactcatccaaagtcacacagcaatttggagttaggttcaaactcaaacttggggcatctccctggctaggttcggttctcttctccttcctctccttcctttctctctttcttcttcttttttttttttttgaaggagtctcgctctgttgcccaggctggagtgcagtggtgccatctcggctcactgcaacctctgcctcccgggttcaagcgattctcttgcctcagcctcccaagtagctgggattacaggcgcccgccactgcacctggctaatttttgtatttttagtagagatgggtttcactatcctggccaggctggtcttgaactcctgaccttgtgatccacccacctcagcctcccaaagtgctgagattacaggcgtgtgccaccgcgcccggcccactttcttttttttctttcttttctctctctttttctctttccttccttccttccttccttttttccttcctttctccctctttcttttactctctttttttttttttgagatagagtttcactcttgtcacccaggctggagcgcaatggcgcgatcttggctcactgcaacctccgcatcccaggttcaagtgattctcctacctcaacttcccgagtagctgggattacaggcagccgccaccacgctcggctaatttcttgtgtttttagtagagatggggtttcaccatgttggccaggctggtcttgaacttctgacctcgggtgatccacctgccttggcctcccaaagtgctgggattataggcgtgagccaccacacccggcccttttttctctttctttctctctctctctcgtttctctctctctctctctctctctctctctctctctctccccccctctctctctgtctctctctctctccccctccctcccttcctcccttcctcccttccttcctctctctctctctttcttagacagagtttcgctgttgttttgcccaggctggagtgcaatggtgtgatcttggcataccgcaacccccacctcccaggttcaagtgattctcctgcctcagcttcccgagtagctgagattacaggcatgtgccaccatgcctggctaattttgaatttttagtagagacggggtttctccctgttggtcaggctggtctcaaactcccgacctcaggtgatctgcccgccttggcctcccaaagtgctgggattacaggcctgagccaccgtgcctggctcttttgtttttctttttttcttttttttttttttttgagatggagtcttgctctgttgcctagggtggagtgcggtggcgtgatctcggctcactgcagcctccgtcttacgggttcagaatctccttcctcagactcccgagtagctgggactacagatgcccgccaccacgcccagctactttttgtatttttagaagaaatggggtttcatcatgttggccaggcggatctcgaactcctgacctcaagtgattcgccctcctcggcctcccaaagtgctgggattacaggcaggagccactgcacctggcactggctgggatttttatgctatgttactgcgtttgagcctcagcagccccgggaggaagaagcagtaactcatcttggagaagggaaggacacctaaggcccaaagagggtcactggtttccctggggccacacactaatctaaaaagagtgagcacttcctaattcctactacccctccctgtccaccccagcaggtcctgccaaaccccgactctgacgacttcctcagctccatcctgggctctggagactcactgcccagctccccactctggtcccccgaaggcagtgatagtggcatctccgaagacctcccctccgacccccaggacacccctccacgcagcggaccagccacctcccccgccggctgccatcctgcccagcctggcaaggggccctgcctctcctatcatcctggcaactcttgctccaccacaaccccagggccagtgatccaagtacctgaagcctctgtgaccatagacctgggtgagtcctgctgtgtctctgcccaccgccctcaccttgttccagggcccttcctgtaagtgaggaaatggaggcccagagagggctggcatcttgtccaaggtcacacagcaatttggagctgggcccagactcaaactcaggacacgtgtctcccttggctaggtgtttccatgctttcacgtggatgctattgggagcccattttccagatcgtgaaacagtcctgtcaggttgagcaatgagctaaaaccacagagctaggatgcaaccccggcaggtggctcaggcaccaggcatggtgctgacaagcacagcccaaagtcagggtcttgccttctacgtgtctgtaccccgtgcctggttcctagtagatttttttttattttttatttatttttattttttgagacagagtttcactctgtcacccaggctggagtaaagtggcgcgatctcggctcactgcaacctctgccttccaggttcaagcaattcacctgcctcagcctcctgagtagctgggatcacaagcatatgccaccatgcccagctaatatttattttttagtagagacgaggtttcaccatgttggccaggctggtcttgaactcctgagctcaggtgatctgcccacctcagcctcccaaagtgctgagattacaggtgtgagccgctccacccagcctgtagatgctcaataaaagtgcatgaggttaccaggtcctaggttccagggtgctcctcctagacgtggggaacagcagatcagtaatgatttactctattgattaagcattcccggcgggccaggcagagccctggctggagatacttggcctctgggtggcctttgtcccttgacccttgctatgagctcttcttggtcccattggagagttgacaaaactgaggctcaggcccggagcggtgactcatgcctgtaatcccagcactttgggaggctgaggcaggcggatcacttgaggttaggacttcaagaccagcctggccaacatggtgaaaccccatctctactaaaaatacaaaattagccgggcatggtgggggccacctgtagtcccagctactcaggagcctgaggcaggagaatcacctgaacccgggaggcggaggttgcagtgagctgagatcatgccactgcactccatcctggctgacagagccagactctgtctcgaaaaaaagccaaaaacaaaaaatgctgggcacagtggttcacgcctgtaatcccagcactttgggaggccgaagcgagcggatcacgaggtcaagagatcgagaccatcctggccaacatggtgaaacctctgtctctactaaaaatacaaaaattagctgggtgtggtggcaggcgcctgtagtctcagctactcgggaggctaaggcaggagaatctcttgaacctgggaggtggaggttgcggtgagccaagattgccacactgctctccagcctggcgacagagcgagactccgtctcaaaaaaaaaaaaaaaaaaaaatctgaggctcagagaggtgaagtcacttactcaaggtcacacagccctgcccaaccaggattagaaccaagggttacctgacccaaagtttgtgtgctgggacagcatgcctactgcatgccggctaccaggaggggacaaccagaggtgaatcagacctcgtccctgccccttgggtgagataacgcctggctggctgcaaatctagcctgtaattctgtgtgataacagccactcccttttgaatcagccggtgtctcctgacaatgtcctgtgtcttcctcagccttgtgggacggacagaaccaagccctgttgaatttgggtccccatcttttttttttttttgagatggagtctcgctgtgtcacccaggctggagggcagtgccacattctcagctcactgtaacgtccaccacccgggttcaagtgattctcctgcctcagcctcccgagcagctgggattacaggtgcacgccaccaggcccggctaatttttgtatttttaatagagatgggatttcaccatgttggccaggctggtcttgaactcctaacctcagatgatccgcctgccttggcctcccaaagtgctgggaatacaggcgtgagccaccatgactggctgggttcccatcttatagcagaggggagaccgagtcactagtgagggctgcccccttcaactcaggccttggggactccaaactctggcagaagtcatatgaatgttgggattaatcatgggagacttggtggaggaggcggttagaggctggaagctcaggactccccccgtctgacactctccctgtctccgtccccacctgccctggtcagaaatgtggagcccaggaggaaggatctgtgctgagaagccggctgatccggtggacctgtccccacgatgcaatctcaccgtgaaagacctcctcctttcgggcagcagtggggacctggtgagcacccccacaccctcccatggggcgttggagctgggagggctgctcgggttcgaggagcctaaatatccccgtttcagagactggaaaactgagtcacagaaaggcgtggaatttgcccacagttagagaccattccagtcctgggctcactgtcgcctgggctggggtgtcttcctctgtagtacttagtagtaacaatagcaacaacaactaaaagctaaaactggctgagtgtggtggttcacacctgtaatcccagcactttgggaggccaaggcaggcagatcgcttgagctcaggagtttgagaccagcctgggcaacatggtgaaaccccatctatacaaaaaatacaaaaattagcctggcatggtggcacatgcctgtggtcccagctactcgggaggctgaggtggaaggatcgcttgagcccaggaggtcaaggctgcagtgagctgtgattgtaccactgcactccagcctggccaacagaccaggactgtctcaacaataacaacaacaaaaagaacaaagctaaaactgaggctgcacctgctatatgccaggcgctctttatttatcatcttaaaaaagttttttttgagacaggatctcactctatcgcccaggctggagtgcagtggcgcaatcctagctcactgcagcctcaaactcctggcctcaagcgatcctcctgcctcagactcccaagtagctgggactacaggcgtgcaccaccacacccagctaatttttcttgtcttttttattttattttatttttctgagacagaatcttgctctgttgcccaggctggagtgcagtggtgcaatctcggatcactgccacctctgcctcccgggttcaagtgattctcctgcctcagcctcccaagtagctgagattacaggcatgcaccaccaggcctggctaattttgtttttcttttttctttttttttttgagatggcgtcttgctctgtcacctaggctggagtgcagtggcgtgatctcggctcactgcaagctccgcctaccgggttcacaccattctcctgcctcagcctccccagcagctgggactacaggagcatgccgcgccacctgtctaatttttcttttcttttttttttttttttttgagacggagtcttgctctgtcacctaggctggagtgcagtggcgtgatctcggctcactgcaagctccgcctaccgggttcacaccattctcctgcctcagcctcccgagtagctgggactacaggcgcccgccaccacacctggctgattttttgtatctttttagtagagatggggtttaactgtattagccaggattttttttgtatttttagtggagacagggtttcatcatgttagccaggatggtctcgatctcctgacctcgtgatctgcccacctcggcctcccaaagtgctgggattacaggcgtgagccaccgtgccccgtttagacccagctgatttttcttttaatttttttctgtagatatgggtcttgctatgtttcccaggctggtcttgaactcgtagcctcaagtgatcctcctgctttgtcctctcacagtgctggattataggcatgagctactgcgccccgcctggggcttttattatcttaattttacataggagaaaaagggcacagagaggttcagtcatttgcccaatgctacacagctgatgcaggcttgatccctgggatggtctattgagcttatggtgcccattgcacaccaattgaaggccatctaccctgccaagggcttcacgctcccataagccaggtttgacaacccaaacccattttgcagatgagaaggtaggtcaaggcccagagaggttaagccatgagccctaagtcacacagcatgcaagtggcagactcagggttttgaaatcctgtttctccaatgccaaaggttatcctgataatctctagtgaaggccagggtgcccctggcaactagagggatatgcagtgagcaccagctgtgtgctcagcctctaggatctgatggtcaggatggggcgatgtactgttcattaaggtgtacagaaaagaaagagagcctgcagggtcactgcagatccaggaaggcttcccggaggaggcagtacttcagcaggccatgaaggaagggaaaggagaatgaacgactgctttggcaatgataactggcttattttgttttattttatttgtttattttttgagacagagtcatggtccgtcgtccaggctaagtgcagtgccacagtctcggctcactgtagcctccacctcctgggctcaagtgattctcatacctcagcccccaggtagctaggactacaggtgcctgccaccatgcccgactaatttttgtatttttagtagagacggggtttcaccatgttggtcaggctggtctcgatctcctgacatcaggtgatccacccgcctcagcctcccaaagtgctgggattacaggcatgagccactgtgcctggccttattttattttatttaaagtcaaggtttccctctgtcaccacaactgcctcaaattcctaagctcaagtgatcctcctgcctcgacctcccattttttttgtatagctgacatacagaacaacgatacaaaaaaaaatgatgcatttataaatgctagttatcagcagttgaagaccagcctgggcaacatagcaagacctcgtctctacaaaaaaaaaaaaaaaaaattagctgagtgtggtggcgcacacctgtagtcccagctactcaggaggcagaggcaggaggatcacttgagctcaggaggtcaaggctgcagttagctatgatcacacgactgcactccagcctgggtgacacagtgacatcttgcatcttaaaagaagaaaagatgggtgtggtggctcatgcctgtaatcccaggaatttgggaggctgaagtggacagattgcttgagcccaggagtttgagaccagcctgggcaacagagtgaaaccccatctctacaaaaaattcaaaattagccaagcatggcggtacgctctgtggttccagctactcgggaagctgaagctggagaatcgcttgagcccgggaggcggaggttgcagtgagccaagagagcaccacggcactccaacccgggtgaagtagcaagaccctatttcaaaaataataatagtaataatacaatgaaaagaagaaagctgtcaaaagggccgggcgcggtggctcacgcctgtgatcccagcactttgggaggccgaggcgggcagatcacgaggtcaggagatcgagaccttcctggctaacacggtgaaaccccgtctctactaaaaataacaaaaaattagccgggcgtggtggcgggcacctgtagtcccagctactcaggaggctgaggcaggagaatggcgtgaacccgggaagcagagcttgcagtgagccgagatcgcgccactgcactccagcctgggcgacagagcgagactcgtctaagaaagaaagaaagaagaaagaaaagaaagaaagaaagaaagaaagaaggaaggaaggaaggaaggaaagaaagaaagaaccctgtccatatgccattttgcgcgtgtgtgaggatatctgtaggactgatttctgaaggtagaatgacccggtcaaaggaccgtgtgttggttatttcgagccctgctgccaagggagattctgtggtggcaggagtgatagtttttgttgttgctgttttgagacagaatttctgtcgcccaggctggatctcagatcactgcaacccctgcctcccgggttcaagcggttcttctgcctcagcctcccgagtagctgggattgcaggcacgtgccaccacaccaggctgatttttgtatttttaatggagacagggtttcaccatgttggccaggctagtctcgaactcctgacctcaagtgatccacctgcctcggcctcccaaagtgctgggactacagacgtgagccaccttttctttttttttttttttgagacagagtcttactctgtctctcaggctggagtgcagtggtgtgatctgggctcactggaacctctgcttcccgggttcaagcagttctcctgcctcagcctcctgagtagctgggattacaggcgccgccaccatggtcgggtaatttttttttttttttttttttgagacggagtctcatactgtcactagggctggagtgcagtggcacaatctcggctcactgcaacctctgacttctgggttcaagcgattctcctgcctcagcctcgcaagtagctggtattacaggcacccgccactacgcccagctaactttttgtatttttagtagagacggggtttcaccatgttgaccaggatggtctcaaactcctgacctagtgatttgcccacctcggcctcccaaagtgctgggattacaggcatgagccaccgcacctgggcaatttttgtatttttagtagagacgaggtttcatcatgttacccaggctggtctcgatctcctgagctcaagtgatccacatgcctcagcctctctaagtgctgggatgacaggcgtgagccaccacacccagcctggggtgatagtgttttcgatctgatacctctttcatttcctgaaggcagttggcgtccctgcacccgccgtcattcctctgattttttccgtagcaacagcatcacctgggggcctcctacctcctgcgacctggggctgggcactgtcaggagctggtgctcaccgaggatgagaagaagctgctggctaaagaaggcatcaccctgcccactcagctgcccctcactaaggtgagtctggggggacttccagccctggatccatctccccttcgtgcacttacctgcatgtgtgtcccacctttatttatttatttagagtagagtctttctctgtcactgaggctgggatgcagtggcacgatctcagcttgctgcaacctctgcctctcagattccagcgattctcccgcctcagcctcctgagtagctgggattacagccatgcgccaccacgcccagctaatttttgtatctttagtagagacagggtttcaccatgttggccaggctggtctcgagctcctgacctcatgtgatcctcctgcctcggtctcccaaagtgctgggattccaggcgtgagccaccgcactggctatgtgtctcacctttagaacacccgtactagaatgctatgctgtgtctgtcaccagagccaaaacaatcagtcagaagccccattgtaaattcaactcagagggtaattatcaacatccaggaatgaatggcggactccaggtggcagcaatttgggtgcagcaaacttttttttttttttggagatagggtcttgctgtgtcccgctggagtgcagtggtgccatcatagctcacttcagccttgacctcctgggctcaagagatcctcccgcctcagcctctcaagtagctaggatgacaggtgcacgccactacacttggctaatttaattttttttttttttttgtagaaatggggtcttgttatgttgcccaggctgggctgggactcctgggttcaagtgattctcccaccttggcctcccaaagtgttgggattacaggcatgagccatcatgcctggccctgcagacatgttttgattggactgtactgcattttatacatttttgaattgcttgataatgtttttctgaccggtagattttacaagagaactcagtgacttgaggctgggcacggtggctcacacctgtaatcccagcactgtgggaggctgaggcagaggatcacttgaggtcaggagttcgagactagcctggccaacatggtgaaaccccgtctctactaaaattacaaaaattagctgtgcctggtggtgggcaactgtaaggtgcttctcagcctcccagcttctcaggaggctgaggcaggaggatctcccttgaacccgggaggtggaggttgcagtgagccgagatggtaccactgcactccagcctgggtgacaagagcgaaactctgtcaaaacaaaaacaaaaacaaaaaaactaaaaacataaacaaaacaaaatccaaaaaaccaactcaattacttgaatgtcctctgtttcatattctcaaacctccatatgcaccagtcaatggctgggtagctgtttgggttctctagctaaccacagtccccacccagcctgctgcactcagtatcaatgcctgagtttgatattctcatctgttttttttttttttctattgagacaggttctgactctgttgcccaggctggagtggagtgaggtgatcttggctcactccaacttccccctctggagtacaagtgattctcccacatcagcctccctagcagctgggactacaggtgtatgccattatgcctagctaatttttttttttttcctgagacggagtttcgcttttgttgcccaggctggagtgcagtggcgcgatctcggctcactgcaacctccgcttcccaggttcaagtgattctcctgcctcagcctcctaagtagctgggattacaggcacgcgccaccacgcctggctaatttttttttttttttttttttttgagtagagacagagtttcaccatgttggccaggatggtctcgatctcttgaccttgtgatctgcccagctcagcctcccaaagtgttgggattacaggtgtgagccactgcgcccagcatttttttttttccttagagacagggtcttgctatgttgcccaggctggtctcaaactcctggcctcaagcagtcctctgaccttggcctcccaaagtgttaagattacaggtgtgagccaccgtgcctggccccatctgtttctattgttgttgttgtttgttttgagataggatctcactttgtcgctcaggctggagtgcagtggtacaatctgcaggtagcagctaactgcaaccttgaactcctggtctcaagggatcctcctgcctcagcctcccaagtagctgggactataggcatgcaccaccacacccagctgattttgtggttgttgttttgttttagtagagacagggtctttactaaatgttgcccagtctagtcttgaactcctggacttatgcgatcctcttgccttggcctcccaaagtgctgggattacagcactgtgaaccaccgcgcccagcctgacattcccatttgaagacacttattggccgggtgtggtgtctcatgcctgtaatcccagctctttgggaggcaaagatgggcggatcacctgaggtcaggagtttgagaccagcctggccaacatggtgaaaccctgtctctactaaaaatacaaaaattagccaggcatggtgttgtgcacctgtaatcccagctacttgggaagctggggtgggagaatcacttgaaccctgggggtggaggttgcagtgagctgagatcttgccactgcactccagcctgggtgacaagagcgaaacaagaaagaaagaaagaaagagagagagagagagagagagaaaaggaaggaaagaaaagaaagaaagaaagaaaggaaaagaaagaaaagaaagaaagaaaggaaagaaagaaaggaagaaaagaaggaaagaaaggaagaaaaggaaagaaagagagaaagagaaagagaaagagagaaagagagaaagggagaaaggaaggaagggagggagggagggagggaggggaaaagaaaggaaagaaaagaaagaaacgtaagaaagaagaaaaaaattattaattagtcttaaaacacttgctgtcgccagggaaaggtgatgtttccagggatggccacaaggtggtggagtggtacccatgcccaaagtctggtgggcagttgcccattttacagtattgggagctgggaaaagaccctcagaacccaggcacctcccagagactctgtgagggtttgggcaaagggtagcttcaagtcattaggaatctgcctctgggtccttggctccgggatgtcttgtatgcaaagaggatggggtgaagttgtggggtcgaggttaggtgaagtggggtcaggacagtggggactgtcgcaccatccccaaagtgaagactttaattttttaattttaattattttatttatttatttatttatttatttatctatttatttattgagatggagtttcgctcttgttgcccaggctggattgcaatggcacgatcttggctcactgcaacctccgcctcccgggttcatgccattctcctgcctcagcctcccgagtagctgggattacaggcacccgccaccatgcctggctaatttttgtatttttagtagagacggtgtttcaccatgttggccaggctggtctcgaactcctgacctcaggtgatacgcctgcctcggcctcccaaagtgctgggattacaggcgagagctactgcccccggactccaagtggggactttctggcctgaaaccctcctccccatttcacttggcagtacgaggagcgagtgctgaaaaaaatccgccggaaaatccggaacaagcagtcggcgcaagaaagcaggaagaagaagaaggaatatatcgatggcctggagactcggtgggtagtgctggacccagactctacactcgtggaggaaactgaggcccagagagaaggagatgtggctaaggccacacagcttagagtctgacaaaattggaggtgattctcctctctgggagagatcatgcttcttactgattgcagggatggaaagatgcctagtgatggtgtaggacaagggtttgggggaccctttgccccctagaaggtgtgcggaaaaaggacaaagtgtgacccatcctattctgaccctctgcctgaagatagacacttcctttttgtgtgtgtggaagggtctccttctatcacccaggctggagtgcagtggtgcgatcttggctcactgcaacctccacctcccgggttcaagcgattctcctgcctcagcctctccagaagctgggattacaggtgcatggccaccacgcccagctaatttctttgtatttttggtagagatggggtttcactgtgttgcccaggctagtctcaaactcctgacctcaggtgatctggccgcctcagcctcccaaagtgctgggattacaggcgtgagccactgcgcctggtctctcccctttcttaaatgcaatctgctaagctcctgatcatctttatccagggtcattccccccaccaccctatgtcctgggtaattgtatcccattttacagacacaaaagctgagatcagagagtggagtggcccaaggtcatggggagagggagagatgaaacttgaatctcggccgggcgccgtggctcacacttgtaatcccagcactttgggaggctgaggcaggcggatcacgagttcaggagatcgagaccacggtgaaactctgtctttacaaaaaatccaaaaaaattaactgggcttggtggcgggtgcctgtagtcccagctactcgggaggctgaggcaggagaatggcgtgaacccagaaggcagagcttgcagtgagtcgagattgtgccactgcattccagcctgggcgacagagcgagactccatctcaaaaaacaaacaaacaaaaaaagaaacttgagtctcccaggatgcctggttgtcctgatatttcatcttctggaaacatcactgcctgaatctaggaggctcagcttttttttttttttttttttttttgacacagagtttcattcttgttgcccaggctggagtgcaatggtgcgatcttgactcactgcaacctccacttcccgggttcaatcgattctcctgccttagcctcccaagttcccaagtagctggaattataggcgcccaccaccacacctggctaattttgcatttttagtacaggcagggtttcaccatgttggccaggctggtcttgaactcctgacctcaggtgatccgcccaccacggcctcccaaagtgctgggattacaggtgtgaaccaccacacccatccagggggctcagctttgaatgaagccccctccatattaatgcagaaatgggacctaggaaccaggcagatgtgggttcaaatcccagccctgtctgacctgccgagtaaccttggatgaatgacttcccctctctggccttgggttctcttggcttgtaacgtgaggcctctgggggagatgtcagtggggccagctggtgactggcatatgctgaatgtcgatgcgtcttcctcctttcaggatgtcagcttgcactgctcagaatcaggagttacagaggaaagtcttgcatctcgagaagcaaaacctgtgagtctgggtccagctggggcagaggacaggggaagcagccccagagtccctttgcaggaagagcagagagcccatgtgatggcagaatgacatagggaataagagttttacctatgggccgcgtgcagtggctcacgcctgtaatctcagcactttgggaggccgaggcgggtggatcacctgaggtcaggagttcaaaaccagcctggccaacatggtgaaaccccgtctctactaaaaatacaaaaaaattagccaggcgtggtggcgggcacctgcagtcccagctactcgagaggctgaggcaggagaattgcttgaactcgggaggcggaggttgccgtgagccgagatcgcaccactgcactccagcctgggtgacagagcaaggctctgtctcaaaaataaataaataaggcctggtgtggtggctcacgcctgtaatcccagcactttgggaggctgaggtgggcggatcacaaggtcgggagatcaagaccatcctggctaacacggtgaaaccccgtctctactaaaaatacaaaaaaaattagctgggtgtggtggtgggcgcctgtagtcccagctactcgggaggctgaggcaggagaatggtgtgaacctgggaggcggagcttgcagtgagctgccatcccaccactcactccagcctgggcgatggagcaagactctgtctcaaaataaataaataaataaataaacaaataaataaataaataaaataaataataaagagccagaggcccttgaagaatggatggaatttggactttagcggggctgggggaccccggaaatggacgagaagcagaaccgaggccctttagggctcagcggaggcctgcctgtctctctaaggtccctcttggagcaactgaagaaactccaggccattgtggtgcagtccaccagcaagtcagcccagacaggcacctgtgtcgcagtgagtcctggtgcccccaggcaagccggggacctaggcttctgtagaggggcccatagggaggtgacaatgagtccaagctctccttgtgccccagctcaagtatgatccagtctggtctttggggcctcagtttccctgcctgtgggatggagatgcttgcaggggaggggagggagggggtgactctgccgctgtctccaccaggtcctgttgctgtcctttgccctcatcatcctcccctccatcagcccttttggccccaacaaaaccgagagccctggggactttgcgcctgtacgaggtaggggatccccacctttgaaacccttgtctggtctccccaagtccccgtcctgggcctctgggggagggggagaagacccctgtgcccttgttccctgaggctgggggccagggaagggagcataggaccccacctccaccttgtcccctgtgatgccccccttccccaatcagtgttctccagaactttgcacaacgatgctgcctcccgcgtggctgctgatgctgtgccaggctccgaggccccaggaccccgacccgaggctgacacaacccgagaagagtctccaggaagccccggggcagactggggcttccaggacaccgcgaacctgaccaattcgacggaggagctggacaacgccaccctggtcctgaggaatgcaacagaggggctgggccaggtcgccctgctggactgggtggcgcctgggccgagcactggctcaggacgtgcagggctggaggcggcgggagacgagctgtgagccccgccaggactatgctcccaggcccctctgcccaggggtgccttggggatgctgcactgggcagctacccacctggggatgggacgtgaggccaagaccccagcagagatgccagaatgggggaggcacagctcatagccacacacccagggcctgactgaggcccacgcaggaaccgacactcagacacaaggcaaagagggccacaggacccgggaaatacacacagagccaggagcagaagcaaagagcagacacacatacagcctgaaacagacctggacagacagacacagcctgaaacagacccggacagacagacacagcctgaaacagacccagacaaacagacagacagacacagcctgaaacagacccagacagacagacagacagcctgaaacagacccagacacagcctgaaacagatccggacagacagacagaaacagcctgaaacagacccagacagacagacagacacagcctgaaacagacccggacagacagacagacacagcctgaaacagacccggacagacagacagacacagcctgaaacagacccggacagacagacagacacagcctgaaacagacctagacagacagacacagattgaaacagacccagacaaacagacagacacagcctgaaacagacccagacacagcctgaaacagacccggacagacagacagacacagcctgaaacagacccagacagacagacagacacagcctgaaacagacccagacagacagaccgacgcagcctgaaagagacccagacagagagacaggcagacacagcctaaaacagacctggacagacaggcagacgtagtctgaaacagacctgaacagacagacagacgcacacacacaacagatgcgcagcaactccccgcccagggacccctcccggcctccctcgcacactgggaggaggaagccgccgagactgcagggagcctggccccggagccccgggtgcgccctggtctttggagcagccacggcccacaatcaccccccttttctaagactgcctgatccgaaataaagtattttgacagaaccttgttttggtgtggaggcggagtctggggctcctcgactccccagaaggaggggctgggccagcctgggatgggtgagtgaggtgtgggctccacacccccgccagatgcccgcgctggagcagcggagggagaggcgccgggcacgacttcagcaccttggagagcggcggcgggcggagtgcggggaggcaggcgtggcgcttccaaggtgtcccctccggagttgcggggaaggcagctgccttcccggggatctgggcggcccaccctgctcattttgcgggcgaggacaccgaggcgtcggaagtggagggactgcctaaggtcacagctggggagagtggaacccggctgctcctgcgctcgtctgtggggtcgcccccactgcgggctgtgcgcgcctgcccgggcgccatcgcaaaatcgcgcccaaagcacaggtggggactcatagcctgggggtaaatgttaaacaacaacaaaaagcatgtgcataagtgtataactacaaactgagtgctcagaaaatgccagctgccttattggcttcatcatcagaaaactggcctgatccctccagaggcggggtggggggagaggtgagcccttgttcctcggcccccaggcttgaggggcagggattgcaacggagcccaagcagctggtccagggaggaggggaccacgaactcctgacccaggggggcgaggacctgccacaaatagggaatttaaacactcactgggcacagtggctcacgcccgttaagtccagcactttgggaggccaaggtggcctgactgcttgagcccaggagtttgagaccagcctgagtcacatagtgagacccccatctctacaaaaaatgcaaacaattagctgggtgtggtggcacacacctataatcccagctactctggaggctgaggcaggagaattgcttgaacctaggaggcagaggctgcagtgagctgagatcacgccactgcattccagccttggtgacagagtgagactctggctcaataaaataaagtaaacacactgagatgcaagaaagaaattgtttttattgcattgaggacttttccagaagcctggtggacccacgtctccctccagccccaaaggcagtgcaagcctctactgatcccccacttcaaggtgggtctcccctcctgcagggcccatggaggaggggtagggtgggctgtagggggcccagaagggaggccctggggacagagggagttcactcctgtttaagctggagaccagggagggcccagcctcacctctggacaacacagcaagtcagaggctggggtgtggcaggggctcacctgtcacctctggggtgtggcttcttcccggaaccgcaccagaggcccctggagcccagggagggaccacggagggcaggtgtaacccctggcctggagcacagctctcagagccctgaggctcccggggacagaaacaagtaacaaagtgagaccacgagagaaaaagaatccacagtttctacaaaaagccccaccctccccaagcaccctggtcagctggggaccgccttggccttcacccttttggggggtctgtggggggcagggctggtgggccgctcccgtttggggctggcgggctctgagccgttgtgctgggcgcagggctcctgcttggggccggcggggatagagccgttgatccgggtgggagattcctccttgggctccagcttgggggtgggcgggcggggcaggggtggcagcgccctctccagcacacgggggccgtcccaggcggggatctccagccccaggtgcttcatgagccgggtcatgacctcgtcaacgtagccatggatgcggaggtcagcatggcggtcctgccgaggggcgggacgggtcaggcgtgggggacagagggtgcatggtggccctgggcaggggtaggctcagacacctacgtgcttggtgggctgcaggttgacgatgaccaggcggcctccccggcgcttggtagccagcggcaggttcccgctgggccggatctgcagcgatgtacccagcgtgatggacaggtcggcgttcctggggccggggagcgtgggctgagcctgatgccctgctcctgccaacatcccgagccagccctgggggccggttcacacctaggccatctgtgctcaccggggcggtcaaggccagccccactcccgagtcagcctttgggatcccgccctgccctcctctgcggtccgttggcggggtcattgatctgggcgggcccttagacacttccggggagtatcacagtgtggtaagagcttggacacctagggtgggaccctggctcggtcacctcccggctgggcagcactggatagaggagacacctggcggaagccttggtttccttgtgtagcacccacccagagccatgaggtgacgagtgtgtgtgagtgcgtgtgtgcagcccctggcctggcccacctgctccaggaagcctcccctcactgcctgtgagcctcagccactgtcccatgctggagctggctgtgtttctgctgtcgtcccgccccgccccaccatgggctccctgggggtggggggtcagacctgctggcctcatcggcgagtgccaggtcccggtcgggcagggagtcctcccagtctaggatggtgtccctcagctctcccctgcaatgaggaagctgaggagagtcctcaggggcctcgcagcctcccctggagcccagggcatgggtgggggtggctcacctgcaggctcgcagcccccttgccttagccacggtgcagagccggcccgtggccttcaggcccatggtgcccacgactgtgtctcggacgtactgcctgtgtcagggaggaagggggaggatgggaccaggtgagctcccatgggtgactctcgcactgtttctagggtgacgttctcccagggaggtggggggtggacaggtgaccagaactagcacccagcgacacggaacgagtagccttccatgaataacgggctgggatgctgctcggtgcccggagcacagaaaacaaagcaggaaactgtcccagacagacgaaggggctcgagagacaagacccagcatgggatcccggaccaggagaaacaggaacaattggagcatgggggcgacaggccgagtctggattcgggattagagaaggcgatgtccactttacttttcctgactttaatcgttatactgggccgggcgtggtggctcacgcctgtcatcccagcactttgggaggctgaggcgggcagatcacaaggtcaggagttcgacaccagcctggccaatatggtgaaaccccgtctctactaaaaatacaaatattagccaggtgtggtggcgggcgcctgcagttgcagctacttggatggctgaggcagaataattgcctgaacccgggaggcggaggttgcagtgagccgagattgccccactgtactccagcctggatgacagagcgggactgtctcaaaaaaaaggagaaacacagagataagaaggcccctgtggctgtaggtccaggaccaccaagggtggctggctgccaccagcagccaggaaaaggcaggaaaaatcctcccctacaggttgcagaggggcatggccctgcagacacctggattttggacttctggtccccagaactgtgagatcacaaatttctattgttctacgctgctcatctgtggcaggttgctacagcagtgccaggacacggatgtaccccccacaggagggaggcacggcccccccaaatccctccaggaggaagacatgccccccaaatccctccaggagggagacatactccttatatccccccaagagggagacacgcccccagatccccccaggagggccacaccccagtccccccataccctctgggtctctgggacatcggattcgacccccaaccccctctggcagagcccccacccctgcacccaggtggcactcacgtcttacacttggcacattcttccacaaacatgttcccgtggagctctgccagtttgtccctgtgggaagagcaggaagaggcttgatggtgggaaaggatccctggatgcccaggctttggagctggtgctaagcccctctcctccaggaaggcttcccggactcctctcccacaacattgatcaactccttctttctggctcttctagctcctggctccaccattcatctgctgtgcatctctgggcaagtggaccaacctctctgagcccaaggaatcattaacccccaaggctgaacccaccttagataacgggaagccctttccactcacaaaatgcccgtccccctccgagagcatatgggaacctcttgatgtcaccaggtcagaagcacaggaattcaaattcccagtttataatggaagaaaccgagacattgaatggccctgaagcatgagatccaatcccagctttattttatttatttatttattttgagacagagttttgctcttgttgcccaggttggagtgcaatggtgcaatctcagctcaccacaacctcaatggcacaatctcagctcaccacaacctctgcctccggggttcaagtgattctcctgcctcagcctcctgagtagctgggactacaggcgcccgccaccacgccgggctaattttttgtatttttagtagagacagggtttcaccgtgttagccaggatggtctcgatctcctgagcttgtgatccacccgcctcggcctcccaaagtgccgggattacaggcgtgagccactgtacccagcctaatttttctgtttttagtagagacggggttttaccatgtggccgggatggtctcgatctcctgacctcatgatccgcccgccttggcctcccaaagtgctgagattccaggcataagtcaccacacctgaccctcctttgcttttttttttttcaagacagagtcttgctctgtcacccaagctggagtgcagtggcgccatctcggctcactgcaacctctgcctcccgggttcaagcgattctcctgactcagcctcccgagtagctgggattacaggcatgcgccaccacgcccagctaatttttgtactcttagtagagatggggtttcaacatgttggccaggctggtctcgaactcttgacctcgtgatccgcctgcctcggcctcccaaagtgctgggattacagatgtgagccaccatgcccggcccctcgtttgcttttataagcagagaaaaatctcttcctcacccctcacccctggctgccgagctcctcgtctcaacaactgacctggctgtcattggttgccccaggggtgagacctggcaaagaggggcaggggagggccacacttttattgggaaatcagcctgccccagagcacaggttcacttcagtgtcagacacgtttagtgtcagattaataaagatggatattaaaaacacaacaggccaagcgtggtggctcacacctgtaaccccagcactttgggaggctgaggcgggcagatcacctgaggtcaggagttcaagaccagcctggccaacatggagaaaccccgtctctactaaaaatacaaaattagctgggtgtgatggcgcatgcctgtaatcccagttactagggaggctgaggcaggagaatcgcttgaacctgggaggctgagcggagatcacgccattgcactccagcctgggcaacaagaacgaaactcggtctcaaaaacaacaacaacaacaaaaaacaaactgcaacttctagaccctgacagctctcctccccttagccccatctcgagggaaattctgcctctggcctcagccgggacagctctgagccatgggactcagagatctccacacactgggccaagaactcagggctagaatcttatagaaccaggaaaaggggactctccccctaaaaatgcaaacacggtttgtggggccccaagctcttttgtgggggcggggccagggtgttacctggggaagcctgagcgcacatggagcccgtccacgttctggctgaccaggaagcggaggaggcccacgcgctccagctgcaccagcgccatgtgggtctgcgtgggccgcgcgctctcaaaggtggtgtcgaacttgggggccagacctcgctcctccatggtccagactccgtggggacccctgaaggtggcaggccgggagagatggacggggagaggggaacagaaaaagagacagagggagaatcagagaggtatagagagaaagttggagagagagaaaatcaggagacagagagagacagggagacagagagagggaatcagaaacagaaatagagggtgagttgcaagaacagggagagggggatagaacaagacacagacagagagataaagagttaaagacaaagcaagtcagagacagaattggagagagacagagagagggagaggcagagagagagagatgaattcacacgaaggcaaaaatgacttattctattcaaccaacactgctgctgcaatgagcccgacgatgctcacatgggcccaagccctgccctccagaagcccttgatcttgggggagacaggtggacacagatcctctggccccaagagtcaagcctggatcagaggaggtacctgggcctggggaagccccgtggaggtgggggccctggggcacgtggaagggcttcctggaggaggctaagcagtttcttgaagggtgagagggaagatcagacagaaggggtaaacaaaggcctgggtgctgggaagagcccatgagtttaggagaaaatgcaagtgttttgggggctgcagcaggagcaggaggggctgaagttggagaggtgattcagggctggggcaggaagggcttcagcttccagcacaaggtattcagaactctacactgcctggcaatggggagccacagcaggttatggaagaggagaaggaggagaaattcacgccttggctttttttttttttttttttttttttttttgagatggagtctggctctgttgcccaggctggagtacaatggcatgatcctggctgactgcaacctctgcctcccgggttcaagcgattctcccacctcggccttccaagtagctgcgattacaggtgcctgccaccacacctggctacgcttgcaaatatgaaagactacatttcccagcaacccttgcagccaggtgtgatcaggtgaccgtgttctggccaatgaggtgagtggaatgctggttgtgacaagggacacatctttttgttttgtttttagacggagcctcactctgtcgcccaggctggagtgcagtggtgcaatctcggctcactgcctccacctcccaggttcaagcaattctcctgcctcagcctcccgagtagctgggactacagatgtgtgccaccacaactggctaatttttgtatttttagtagagacagggattcaccatattggccaggctggtctggaattcttgaccttgtgatccaccatgcccagccaagggacacatcttaaagggagtacccaggacacatccaggaggaaagcagatggatgtgttctcattcccagatgtgtgtggctcgcagggaagcctctggcagcctggtaggccttgcctcgacttcccctgcacaatcacagacctgaagtcggggatgccagaggcagtgctgatgccggcacccgtgtggaacaccacactggaagactgccagaccagcctcgccagttcccacaccttccgctccagctcctccggggggtcgaagatctgtggggggagagagcagacggaggggtcaaaacagttcccccaagtggcaaggccacgcacgagccacagactgagctgtccctgtcttgcctgagggaggaaaatggattggaaaaggcagcttgtcctcatgcccctcctcttcctacaaccttccatgcctcccacctgccttgtcaaagccctagcccttcccacggcccaccaggccctgcactacctcccttgccccctccctgccctcttctcctccctctccctgcctcactctgctccagccacacaggtctcctccttgttcctctatcacaccaggcacagtcccgcctcagggccacaccctttaatgctcttcccccagatacccacatggctccctccctcacctcctgtaacttgtggcttagatgtcacttcagtgacagtgatgcctcccttggccaactggtttccatgcaacccctagtcagtctcccttactagaaggaggggtttttaatctgtgttgctcctggctgtggccttagtacctagaaagtgcctgagctacagtaagtgctctataaatgttggtggaataaagtgactaacaggccgggtatggtggctcacgcctataatcccagcactttgggaagccaaggtgggtggatcacttgagatcaagagttcaagagcagactggccaacatggtgaaaccccgcctctactaaaaatacaaaaattagccaggcgtggtggcaggtgcctgtagtctcatctactctactcaggaggctgaggcaggagaatcgcttgaacctaggaggcggaggttgcagtgagccgagatcgcgccactgcactccagcctgggcgacagagaaactccatctcaaaaatataataataataataataaagtgactaacagcagcagtgaagagtggggcttctggacgggcgcacaccatcagcgctcattaaatgcatgagtcagaatgcatgggccagccttatggaatggggccatcttcacctcgtttgcagaaagtttggagatggagacccaaaagggaagtgacttccccaaagtcccacagtgcgtggagggggcagccgatccctccacttcccctctgagtggctggagggatctttctggcacattctgtccagtcccctcgccagggcaaaacccttccccatcaccctcaggataaagtgccaactccccagcctggcatttgagccccgtcctggcccggctctggaaacctcccaggcctaatcgttctccaggtgtgtttattcccacctccctttgcgcctgtcgtcccctcttcctggaactacatcccctctctccccgatcagccccgacagggtgaccacagagttgggcgtgttggcgtcccccggcgcgcaggggcgtcacttcccgccccttcctcactgggaagtccctcccattgtctagcctcagtgccccctgatattcccacaatgcccccctgccatccggccgctcccagcccgcggccctggggcgcgatgctcgggaccctcagacgcgctcacctccgggaggccgcacttgcccttgtccgcgtacggcgacagccccgccgcgtaattcaccgacatcctcgactgccccacgggaacaataaagtttcccttgttgaggccgcttccgccggaagcggggcggggcggggaagaaggaggaaccgcgttccagtcctgcgcacccggcctcccacggcaaggcgcatgcgcctcttgctgacgccgcaggcgacatgttatctgctgtcagaaggaagcctgcctctttgcatgcaggtgtttgcggggcttgggaaggggctccccgatgacccgggcgggaaattggggcggccgcctacgtgagagttctccagtcacctctaaaatgcgggacacaggctatccatgtccccacaaccccttttacggattagtaaattccgtaaggacagagccggacagcagggaccccagcctaagggttttgaatgccacgcagagttacctgaatatctcatttgtgtgtgtgtgtgtgtgtgtgtgtgtgtgtgtgacggagcctcgctctgttgcccaggctggagtgcagtggcgcaatctcggttcactgcaacctccgcctcttgggttcaagcgattctcctgcctcagcctccctagtagctgggattacaggcgcccgccaccacacccagcaaatttttgtattttttagtagagacggggtttctccatgttggtcaggctggtcccgaactcctgacctcaggtgatctgaccgcctcggcctcccaaagtgctgggattacaggcgtgagccactgcgtccggccaagttatctgagtatcatccaactggaggttctgcattctgcaggacaggtcctgctcaaggtcaatggggctggtggcctggaggactcatttaagaatcatgtgttgagtacctactttgtactgggcacactggagagcaaaggtggtaccatctatgccctggtggctgcgggtggacacaaacatgtgaccaggtaatggtgacatggtgtggttggggtgcaatgggtgatgcagagggcacagggcagtgagggggctcacaggaggcacctgacccaggctgggggcatccgggagggcttcctggaggaggggatgttgcagcaaagatctaaaaagtgagtgagccgggcgcagtggctcacacctgtaatcccagcactttgggaggccaaggcaggtggatcacctgagattgggagttcgagaccaccctgaccaacatggagaaaccccgtctctactaaaaatacaaaattagctgggtgtggtggcctgtaatcgcagctgctcgggaggctgaggcaggagaattgcttgaacccaggaggcggagattgcggtgagccggagatcgcgccattgcactccagcctgggcaacaagcatgaaactccgtctcaaaaataaataaataaataaataaagagtgcatgagtcaggtagagccggttggggtgacatgaagtacagaaagaatgttcctggtggggggaacagcaagtgcaaaggctgagaaagaggaagagcatggctccttccagaaactgaaatcagtccagtgatgatagggaagatcgtgggtgtcttcccgccagagccagttggccaacaggcagtccgctgccagcctgtctcctccctcggctcatccccggccccctggggcggccgcctgctcagagccgatcaggtgtcagagtggagcggctggagctgctcgtggcccagctgggagtgggtaaccggagccggcagtgggcactgtggccgggagctcggggcactggagctgcaggaggtaggggaggaaggaggtgggagaggcccaggacggaggatccccttatggccccaggcccctgagcccttgtatgtgggagaaagaagccgtgctgagtcctagccaggctgcggagctacccaggtaccctgacacacacatgcactcgttcacccacgcacttcccacttgccggcctgtgccctgcctagcttcctccaaggcaggtgctcaacatcccacccggccatcaggcccttcttatttaccatcacctcttccagcaagcagcttcctaaatttagcaggcgtttctccctcccccaagcccacggattgtcttctcccaagcagcctgtgaactcctctgttgggtgtcttattaccccctgctttgggtgtgattgaatcctccagtcagaggtagaagaaaaaagggtaggtagtgagtgaatgggcaccggtggaggggtagatgaatggatgggtgggtggatggatggggggcgaataggtggattggtggtttggtagatgggtgaatgggtagatgtatggatggatgggtggatggatgaatgggtgggtgattgggcaaatggatggagggatggataagtggatggatggatggatggaaggatccatggatggactggtgggtgggtggatggatgcactggtgggtgggtgggtggatggatggattggtggttgggtgggtggatggagggatggataagtggatggatgagtggatgggtgggtgggtggatgggtggatgggtgtgtgattgggtgggcagatgggtggatggatggatgcttgggcagatggatggatgggtggttgggtggatggatgaagggatggataagtggatggatgggtggatgagtggatggatgaatggtgggagttggtaggtgtttgggtgggtggatggatgtgtgggtgaaatctgattaaagggtgatgaagaaccatgagaacatgaattgggtgggtgggtttgtgggtggtggccagtgggtggttatacagtgcttaggtgggaggatggatgtccaggtgagtgcataggtggtaaatgcgtggaagggtggcttggagaattcacgagtagataggtggacaggtagaggccatgccaacccctactccttggtaagaggcaaatacagattctccatcacagaaatccctttcacacatagggcctcacagtcacacccctcaaaaaacacaccccctcaagataggcctgcctgacctccgtgcctgcccatgcggaacgtagaacaggcccaggtggacagaagtgcacgtgtgcacacgccccacactcaacgtcacacacatgcatgcagccattgccccagacctccacccactatgggtgaattgctgtcacatggaggttccctctgactatgtagcaaacatgcctctgtgctgagagccgtcagccctggcttcagtccccagggagcccctgactgttgaaaaggacagaatcagcccagacccttccagcccatggagccaggggtgaggcagaggcagagacccagccagggtaggcgggaacccaatttggggagttagatctctgcttgggaacaagaggcaaagctgataagagcaagggattttggaactgggctttgaaggatgagtaggagttcagagaagaaaaaagaaaccattctaggcagaaataactgcacaggtaaaagttaggagaccagaaaaggcttgatctgtttggaccgcaggaaataccagtgagatgcatttatgaagcccctcatgtttggccaggctctgtgtagggaccatgctgaaaactgaccatgagttggtcaagaaaggatcatttctgtcactgtatagatgagggaagtaaaacagagagggcaagtaaactgccaaaggacacacagcaggtaggagatagagcaggtctgtgtcttgctctaggggccaggactggtcaggaaggaggaagcggtccttttgaggagggcgaggcaacggaccctgccgcccaccaggactggtgtccctcaccttacccccacccttgccctcctcaggtggcctgtggagaggagaaacacagggcaccaactatgaagactctcagggcgcgatttaagaagacagaggtgagtgtgaggccctagatgcccgatacacccctgcaacttcagccttctgtctcctggggcttggctgaagatccaccctttcattccagtacccacctcttctcctttcctctctgctgccccctagcgtcatgacctccccactgctccccgtacaagctttccagcccaggcctttacccaggccctagtccgctctccatggaattccttctcgccgcattgccaccaatcagaccctcctaattcctcacaatttggccccagtaccacctccccgtccaatctccgctctccccggccacagtaaccccttgcttttccaaggacccactttcccgaggatcctgatcttttgctttggtgtgtgtgtactcagcacatatttatatagcaggcgctgttccaggcacaggggaatcagccagggaatagggcaggcaaaaatccttgccctcgtggagccgaccgctgagtacgggagatgaacacgaaacaagataaataagtgacaatgtgtattttgtgtcgcaaagacagacaaagcaggaaaagggaattgaagcattcagggcaggggaggtggctgcagttttaaagagggtggccagggaaggcttcccagaggaggtggtattaaagcaaagattagaaagggaaggggagggctgggcgtggtggctcacacctgtaatcccagcattttgggaggccaaggcaggcagatcacgtgaggtcaggagttcaagacgagcctggccaacatggtgaaacgttgtctctactaaaaatacaaaaattagctgggcacggtggcgggcacctgtaatcccagctacttgggaggctgaggcaggagaattgcttgaacctgggaggtggaggttgcagtgagctgagattgtgccattgcactgcagcctgggcaacagagtgagactccatctcaaaaaagaaaaaaaaaagaaaaagggaaggggagtgggggagagagtttgcaggaattgcattccaagtggctggaacagccagtgcaaaggccctgaggtagatccagctgtcttctcttgcatccgtgtctttggctatgaactcctagaaagacatgcttcttcctccattgtccccattcttctcagccccctcaagtccctgtggcggccaattcagggcacagatggggaggatgaaagggagggctcacctccagggacaggcaatcagccttcctgagcacctctttgtgcctggcctgggtgggcaagcttgacttggagcctttagttttcgtatcatgggatacaacatccccatctggtgtggcctggagaaatcagggagtctgcctggaggaggtggcaccggagcagagcctggaagaatagggaggatttagagaagtgaaggcaggcacgtgaggagcggggcacggacctgtgtgggtaaagattcggaggctggaccaggtctgcttgatgcacaggcataacaggcagattctcttggcaggagcagagagtgcgagtgagtgggagctcaggatctttgaaagccatttttgaaaagccaaaaagagaggcctgtggaacaagcctggatttcattttttattttattttattttatttttgagatggagtttccctcttgtcgcccaggctggagtgccgtggcttgatctcggctcactgcaacctccacctcccgggttcaagtaattttcttgcctcagcctcccgagtagctgggattacaggcacgcaccaccatgcccagctaattttgtatttttagtagaggcaggacttcaccatgttggccaggccggtcttgaactcctgacctcaggtcatccacccgccttggcctcccaaaatgctgggattacaggcatgagccaccacgcttggtccatttttttttttttttttttttttgagacagagtctctttctgtcacccaggctggagtgcagtggtgctatctcaaccgactacagcctccaactcctgggctcaaacgatcctcctgcctcagcctcccaaagtgcagagactataggcgtgcaccaccacactgggctaatttttattttttgtacagatggggtgtagctgtgttgcccaggctggtcttaaactcctggcctcaagcgatcctcctaactcccacccagagtgatgggattacaggcgtgagccactgcgcccagccaagcctgggatagaatcaggtggctctgagttcaaatccttcctctgtccctggtgtcctgggtgactctggggatgtcatgccccctctgtggcttccttcagttgtttgggctcatttgatttgatttgatttcatttatttttgagacagagtctcactctgttgctgaggctggaatgcagtggcacgatctctgctcactgcaacctctgcctcctgagttcaagcaattctcctgcctcagccttccaaatagctgggactacaggcgcctgccactatggctggctaaatattttgtatttttagtagagacagggtttcactatgttggtcaggctggtctcgagcttccgacctcaggtgatttgcccgcctcagcctcccaaagtgctggaattacaggcgtgagccactgcactccgcccattttattttgtttttaaactatttattaattatcatgtacccattcatttcattattcatttttattttatttaaaacattttaatttaatatcattggattcactttattttttttaatttttctttcttcttttttttttttttttttttttgaaggagtctcactctgttgctcaggctggagtgcagtgttgtgatcttggctcactgcaagctccacttcctggattcaagctattcttttcttatgccgcagcctcccaagtaggtgggactacaggcacgcactaccacgcccagcaattttttttgtatttttagtagagatgggtttcaccatgttggccaggctggtctcaaactcctgacttcaagtgatccacccaccttggccttccaaagggttgccattataggcatgagccaccatgcccggccctaagtttttttttttaagagatggggtctcactatgttgtccaggctggtctcaaactcctgggctcaagagatcctcccgcttcagccaagtagctgggactacagatgtgcagtactgtgcccggcttatttattttcatttttgttgatttttgagcactataaaaaatataagatgtgctttgcaggtgtcagctcatttaatcctcaccaccgtgttatgaggcaggagcttttattatcttcattttatagatgagggagggaagcccagagaggttaagacacctgctcaaggtcacacagctaggaagtgagacacaagccttcccccagggctgcgttactatgaacatgattggcctggaggtgggaggggagtgcattgattgaaaagagaatgggtggagacagacagcgggagagaaagaggtgaaaaacggtccattaactgcctacaaaatgtggcattgggtgagcttcattcactgtggagtgatcctaaaatttttcttcccacgtggactcaattcctcgatgatagttgacccttgaacaattacagcccaccctcctgcacagtcaaaaatccatgtataggctgggcgtggtggctcacatctgtaatcccagcactttggaaggccgaggtgggtgggtcacgaggtcaggagatcgaggccatcctcattaacacggtgaaaccccgtctctactaaaaatacaaaaaatcagccgggcgtggtggcgggcgcctgtagtcccagctactcgggaggctgaggcatgaacctgggaggtggagcttgcagtgagccgagatggagccattgcactccagcctgggcaacagagcgagactccgtctcgaaaaaaaaaaaaaaatctggctcggcatggtggctcacgtctgtaatcccagcactttgagaggcagaggcgggcagatcacctgaggtcaggagttcgagaccagcctggccaacatggtgaaaccccctctctactaaaaatgcaaaaattagccaggcagccgggcatggtggtgggcacctgtaatcccagctactcaggaggctgaggaaggaaaatctcttgaacccaggaggcagaagttgcagtgagccgagatcacgccattgcacgattgcccagcctgggtgacagagcgagactccgtctcaaaaaacgaacaaaaaaatccatgtgtaagtggacctgggcattcaaacccatatttttcaggggtcaactcctgaatgctttttttccccaagcattcctcagaagtagtagccactggtaaaccaagccatatgattgcttaatttccaaagcatagttatatttaatatttaagtaaatctttcaagaagtgtgggtggctaaaaaagagatacctcattcgggatgtgggtgtgttttgatatgtttgcaatgggaggggtcgggacaaagtcaaaattggatggggacaggataggtgttaaaacctcagacgggtgtgagggcctctgagagtgtctggagctggaggggcctgaggttagcccatagcctgggctggaactgttgcagcagatgggaggcctggctgttgctgggaagctgcagggcctccatcctcccctcccagagcaccttgccatccatccctccacctgcccttctccagtttcgcagcaggcagccggagtcaagttcagcttttgttcagcagccccgagggaagaaagcaaacacccatgactgcaggggccaggcccccccctcctgtcactgggaccttgtgttccgtgtcttctagccactgctacccctctcctcctctccttagggcactctccggcctttcctggtccctaacaccggctttttcttatttatgtatttacttttattttattttctttcttttatttttatttatttatttatttatttttgggacagagtctcgctgtgttgccaggctggagtgcaatggcatgatctcggctcactgcaagctccgcctcccgggttcaagagattatcctctctcagcctcccgtgtagctgggattacaggtgcacgccaccacacctggctaatttttgtgtttttagtagagacggggtttcatcatgttggccaggttggtctcgaactcctgacctcagatgatccgcctgcctcagcctcccaaagtgctgggattacagacgtgaaccaccgtccccagcctatttatttatttattttgagacagagtcttgctctgttgcccaggctggagtgcagtggtgtgatcttggctcactgcaacctccgcctcccgggttcaagggattctcctgcctcagcctcccgagtagctgagattacaggtgcctatcaccacgtctagctaattttttttttttggtatttttaatagagatgggttttgccatgttggccaggctggtctcaaactactgacctccaatgagccatccgcctcagcctcccaaagtgctgggattacaggcgagagccactgtgcccaaccaacaccgtttctttctttggggtcccaacagttggcattgcttactctgatcccccttgggctgtccgtgggcctcagtgtttccatccataaaatgggagttacctggagctgttcacttggggcttcactgacctcctgcctttactttaggtttcaggaaaatctcccaagtgggaagattggggtttctagagagtcacagactccatacatcaatgcttcctggaaagtcctctttctctttctgtcttttttctttttatatttttattttttacttaagtatgcattttttttttttcagaggtgaggtcttaccacgttgcccaggctggtcttgaactcctggcctcaagcgatcctcccgccttagcctcccaaagtgctgggattacaggcgtgagccaccgcgcccggccaggcctcgtattttcatttttcaccgagccctgcaaaacctatagctggtcctgcatggaatacagcagtgactaagatagacaaaaatcactgcccctgaggaggtgacattctaagggagagatcaagaggaaacaagctgggcgcagtggctcacgcctgtaatcccagcactttaggagatcaagatgggaggatcacttaagcccaggagtttgagaccagcctgggcaacatagcaagaccccatctcttcaaaaaaaattcaaaaattagttgggtatggtggtgtgtgcctgtggtctccagttactcaggaggctgagatgggaggaccacttgagcccaggaggtcgaggctacagtgaatgatgattgtaccactgcactccagcctgggtgacagagcaagaccctgtcccaaaataaataaataaataaaaataaaaaatgagagtaaacagaatatttttaaaaaggtatgtagtatcttaggtggtgataagaggcctggcgcagtgactcacgcctgtaatcccagcactttgggaggccgaggtgagtggatcacttgaagtcaggaattcgagaccagcctggccaacacagcaaaaccccgtatctactaaaaaatacaaaaattagccaggcgtggtggtgggcacctgtaatcccagctactcaggagtctgaggcaggagaatcgcttgaatccgggaggcaggggttgcagtgagccgagatccctccactgcactccagtctgggcaatagagcgactccatcaaaaaaaaaaaaaaaaaagacaacaatgaaggaaaaatatagctaaagaaagggctgtcagagaagggctcttggaagaggcatctccaagagtggacagcagtaaagaaagcagccatgtgcacggtggggcaggtgctccaggcagaaggagctgcactggccaaggcttggaggtgggacccagctgtttgaaggacaagaaggaggctactatggcagcatggattacaccgagggaaatgtaaatggagatgatggcaggcgcggtggctcatgcctgtaatcccagcactttgggaggctgaggcgagcagatcacctgagatcaggagttcaagaccagcctgtcaacatggtgataccccgtctctactaaaaatacaaaaattagccaggcatggtggcgggtgcgtgtaatcccagatactcgggagactgaggcatgagaatcacttgaagccgggaggtggagtttgcagtgagcagagatcatgccactgtactccagcctgggcgacagagcgagactccgtcgggagggagggaggaaggaaggaaggaaggaaggaaggaaggaaggaaggaaggaaggaaaaactccatgaggtcaggggtcaggcactggcagagtggggctgctcagagaagggttagcaaattttttcttaaaaggccagaggattaatatttttggtttgtggtgcagaccagcctcagctctgccattgcagcctgagaatagcctttgactgtctacacttttttcttcatatcctgcatgtggcatccaacgatctacaaatgaatgggcagggcttggccccgaaaaaactttatttatggacactgaaatgtgaattgttttgttttgttttgttccgagatggagtctggctctgtcacccaggctggagtgctctcaggttactgcaacctcagcctcccactttcaagcgattctcctgcctcagactcccgagcagctgggattacaggcgtgcaccaccgtgcccagctaatttttgtattgttagtagagacggggtttcaccatgttggccaggctggtcttgaactcctgacttcaggcgatcagcccaccttggcctcccaaagtgctgagattgtaggcgtgaaccaccgcacctagccagaaatgtgaatttcatatcatttttcacgtgtcaggaaggatgattcttattttgcttttctctcccccctccaacgactcacacgtgtaaataccattctctacggaaacaggcagtgggcaggatctgggctgctgtgagcagtttgcattttaagctgagtgaggtctctggaggcttttgtgcaggagagatgagatctgatgcaggtttaggaagctgcctctggctgctgggggagaagggacaaggggacaaggtcagaggctgaagaagaaagatgcatcccagaggcagaacctgcagtgatggggctagactatggtggtggccgtggaaggggtgagaaggggcagaacaggacacagtgtgcagccagtgggcttggccggtggaccgagtgtggggcaagagagaggtgtcacggtgatgccagggcttggatgaagcctggagggctgacagtatccatggtacacacctcagtgggctccgaggggcatttgctctgattgattgattgatttttttcagatggagtctcgctgtgtctcccaggctggagtgcagtggtgcgatctcggcgtgagccaccgcgcccaggtttttgtttgtttgtttgtttgtttgtttttagagagggagtctcactctgtcacccaggttggagtgcagtggcacgacttctgctcactgcaagctccgcctcccgggtgcacgccattctcctgcctcagtctcccgagtagctgggactacaggcgcccaccaccacgcccggctaattttttgtatttttagtagagacggggttttgccacgttggtcaggctggtctcgaactccccatctcaggtgatctgcctgcctcagcctcccaaagtgctgggatgacaggcgtgagccaccatgcctggccatttgctctgatcttgtatggcatccaggaggacaagtgtaggagacagttggaaactgaagccctgagctgggagatccgtttcggtctcttctctggagaagctcagaggacctccccacccccaagggtggaaggagagaagagttccaaggacaccctccttcccaaatgcctgtcactttccattttcctgccttggttcccactcctccctcctcttgtccaaacatgtctaagagggccgggcgcagtggctcacgcctgtaatcccaacactttgagaggccaaggcaggtggatcacgaggtcagagttcaagaccagcctggccaacatgacaaaaccccgtctctactaaaatacaaaaattcgctaggcgtggtggcgtgtgcctgtaatcccagctactcgggaagctgaagcaggagaattgcttgaacccgggaggcagagcttgcagtgagccgagatcgcaccactgcactccagcctgggtggaagagcaagactccgtctcaaaagaaaaaaagtaaaagtctaagaataatcacggaccacaccgacgtgtaaatgctcaatgctcacccagccctaagccagtggtcaatgtgtcaatggagggacacttgccagtgttgggatatctgtggttgtcacaacttggagtgctcctggtgtggagtgggtggaggccagggatgctgctcggcaccctgcagtgcccaggacagccccattctagagaaagatccagcctcaaatgcccacagtgcttccttggtgcctgtcctattatctatctcatttaaccgttgagaaattgagagggagaatttcagagagggaaagcgattagctcaaggtcacacagcaaggatgatataaccaaacggaattcaagcccctgtcacctgtctgctgcgtcgttgctcttaaattctggctctggaagacctcggttttgttgttgttgttgttgttttagtttgtttgtttttgttgttgtttatttgttttgcagtggagtctcgctctgtcacccaggctggagtgcagtgacgcgatctcggcttactgcaacctctgcctccagggttcaagcgattctcctgcctcacttcctgagtagctgagattacaggcgcccgctaccacacctggctaatttttgcatttttagtagagacgaagtttcactatgttggccaagctgttctcgaactcctgacctcaggtgatctgcccgcctcggcctcccaaagttttgggattacaggcgtgagccaccgcgcctggcctccagggctccttctaaaatgccaattacctgcaagggtcttggctgtgccccagagtctccaggcctgcgaatgctgcgtggcatccagtgggcgctcaataaatgcttactgcttgaaggagcatctcccccaagtgttcatctgatgcatgtttgtggagcacctgccatgggccaggcactggggacgctacagtgacagaaaggaacccaaggcccctcctctaccggaggagccgtgggtcccaggagtggcggaaattgaccggaaatggctagagaatgtcagagctgcgccgggaccagctagctctttctgtgaggaacgagtcacagttttatggtgcgcttactgtatgctaggcactggtcgactgagtgctgccaggtagtaccttggcatcctcccggtaaccctccgcagtaggaactatttattatgaaacccattttacggaggaggaaggagaagtccaaaataggtaagtctgttggccctgtcatataggtaggaaaggctggggcaggggcggggtgctggattcaaattcaggtgtgtaggattgcagctccccagtggcgaatgaatgaatgaatgaacgaatgactgattgaatgaatgaatggatgaggcaatgagtgaatgaatgaacgaatgggcgtgccaatgaatgagcaaatgagtgtgggaatgaatgaatgaatgaatggtgcgggaatgaacaaatgaatgaatgggtggtgaacaaatgaatgggtgagtgaactaatgaatggatgaatgggtgagccaacaaatggatgaacaaatgagtgagttaatgaatgcaggaatgagtgaatgcaggaaggaatggtgtgggaatgaataagtgaatgggtcatataagaatgaatgaatgaacaaatgggtgagaccaatgaatgaatgaaagagtgagcaaataaatgggtgaacgaatgaacgagtaaatgaacgaatgaatgaatgaatgaatgggtgagcccgtgaatgggtgaacaaatgaatgagtgaatgaatgaaagggtgagcgaataaacaaatgggtgaaggaatgaacgagtgaatgaacgaatgaacaagcgaatgaatgaataagtgaatgaacgaatgggtgagtgaattaatgcatgaaagggtgagcgaataaacaaatgagtgaaggaatgaacgagtgggtgaacgaatgaacgagtgagtgaatgaatgaacgagtgaatgaacgaatgggtgagtgaacgaatgaatgaatgggcgggccggtgaatgaatgaacgaatgggcgaacgaatgaatgagtgaatgaatgaaagtgtgagtggcgagagccctgccggccgcgtggaggtgcgaggctgcggacgtcgcgggcccggaggcacctgcgcgcccttggccgactcggaggaggtggagatggacgcccgcgggtcccctggagatgcagccggcggcctgcgctggtgagggagccgggcccccggcgccgcgtcctcctcatcctccaggcgacaaggtcaggaggggccggggcggcgccccttccctcagcccccagcccccagccccctacctgggtcttcccattccatcccgtgggggagggggctggcgaggagggcaagggggagggggcggcaccagggagggcgggaccgggcgggcgggcggggcggggagctccggcagcgcccagccccgccctccggccgctccccgcggtccctccagaccctctggccgccgcctcctcttggaaccccgtgcgccccccgcgccccgcgccccggacgccatgaagcagctgtgtctgtgcgcagccgcctccttcgcggtagggcccggggagggggcgcaggagcgggcggggcgcgggtacctcctctcccctcccttccccgtccccggctgacctggaccacccccccattccagacccgggaaagatggtcggcggcggggggtgggggggaacagaggttggggcagcttttgggggaatggaagagacatttggggagacatgtggacacgttttggaagactctttgaaacaaatggggacatttaggaacatttagagggcattggggggtgcagttttgggaaaacattttggagacagatggggtcattgaggggacaacttggaagctattttgggagagccgattttgcgaagaggtaatgatttggagaacagtttgggagaacatttgagggatgtttttggaggatatttttgggacatgacggtatcattgggaaggatggttttacagaacacttcaggaatttgggggagacatttcgtaatgcatttcaggctatagtgttgaggggagaagcctcgggatgtttaggggacagtggtggcatttcagggcagttgtggataaacagggcagaggatggtcctgagaggcatttaaaggggacttttaggggttcagatgggactttggagggtagtttggaaaagactcatggatccatttgctgggggcgatgttgcaggggtggctttcactaagggatgaattgggggacaactttttttattgtacagagtgggtcttgctgtgttgcctaggctggtctcaaaattcctgggctcaaatgatcctcccacctcagcctcccaagcagctacaggcatgagccaccatgccccgctgatgatttttattttttgtagagacggggtcctactatggtgcccaggtttgtctcaaactcctaggctcaagcgatcctcccaccttggcctccccagatgctgggactacaggcgtgagcctccatgctcagcccaggggacaacgttttggaaatagatgccagggggctgctcaggggatgatgctggtggtgggcttttgttggacaactggggtgatgggcctgggggcagatgctgggggtcgcaggcttgggggacactgtctgaggaccccctcgcccaggaccacctccccctgcagctgcggctcagccccactgaccttggctcctgcccgccctgcggcccctgccccatcccgaagccggcagccagaggcaggcgccaggcaagtgcccaggggcaggtggtgagagcccggagcccctgtcgggggcgtggggaggggacagcagccaacactgccccacgcacttctgggcgtgccctgcagagtcaagactggggcaagagtgacgagaggctgctacaagccgtggaaaacaacgatgcacctcgggtggccgccctcatcgcccgcaaggggctggtgcccacgaagctagaccccgagggcaagtccgcgtgagtgcccgcgacccgggagtgagatggctgaggggtggcaaccttgcggctgaacccttgtctctcacctccaggttccacctggcggccatgcggggtgcggccagctgtctggaggtgatgatagctcatggcagcaatgtcatgagcgcggacggggcaggtactgccagctgggccccggggagggaggaggaactaagcccaggtgcccagcctgagggtccagccagaccctgctcccaggtctcaatgttccccgctgaaaaaaggggaggctccctctggtgctcctcccctgcccccagggagacacacaggggcatgttaggatggggtggccaaagatagagactgtggctggcaccgagcaaagccagtggacagcttgtggatggggagtgactaggattcaggtattggttcagttggatggggaagtagctggcatggggaagtagctggggcttgggggatagctgcaaagtttctggggttttgttgttttgtttttcttttttggggggagggacagggtctccctctgtcacccaggcttgagtgcagtggccatgatctcagctcactgcagtctccatttcctgggctcaagggatcccctccaacctcagcctcccaagtagctaggactataggcgcacaccaccatgcccagttaatttttctattcttagtagggatggggtctccctgtgttgcccaggccggtcttgaactcctgggctctaagtgatccttccacctcagactcccaaagtgctgagattataggtgtgagccaccatgccaagcctggggaagtttctagaaagtgactgaggcagaggaagaactggggcttgggagataactgggaccattggacgaactaagctttgaggtgcatctgggatataggagtatccgagataaaggaagtgactgaagggaactgcttggagtttggaggaggaactggattcatgggagtagctgagcttgcaaagtatctggggcaagagaataacaagtagagtttggggatatctgaggtatatgggatagctgggatctaggagtagctggagctgtgggagtagcttgagctcttggagtagctgggttacgaggagaacttgtatgtatgtatgacttaactggagacctggggggaataactgagataaaaatgtgtggccaaaaggagtagttggggctcaggaggcaactaggcatggggacacagtcaaatctgaagctttagggtcacaggcatggtgggcagggaatatggaatagctggggattcatggagcatcagacagggacagagttggcatttggaagaggaagggtatatggattggcaagaacatatacagcaactgtgggttgtgaagggcagagctgaaactttggtgtagtggaccctgtagagtatctggggacatggggagtagctgaggcaatagggcttgaggaataggtgggtgtggacagtcgctgagatgggattgtctggaatacagactagccatggcttagagagtctctgggtacagggaatagcatggttttgagaagtacctgatggccgggcaccatggctcatgtctgttaattccagcactttgggaggctgaggtgggaggatcgcacgagccaaggagttcaagacgagcttgggcaacatagcaagactcctgtctctacagaaaatacaaataaattagccagacatggtggcacttgcttgtagtcccagctactcggaaggctgagacaggaggatcgcttgagcctaggtgttcaagcctacagtgagctatgatcacactgcactctagcctgggccacagagcaagatcctttctgcagggaaaaaaggagagaaatactagggtttacggactttgctagactcagaaactcatcacaagtagttgacatggcttggggagcagctgggagctacttgaatagctggagctccagtaaatcttctttccttccccaggttacaatgccctccacctggccgccaaatacgggcacccacagtgcttgaagcaactactgcaggtcatttactgtcttatctcagctactcccttggcccctactactcctgagttccagcaattccttgaacccccagatgctctatgaatcctagatattccttggccccttttactccagaaccctagctactccctggataaccaggtactctcagaccatccacatgcttctcctatttaagatgtactcccaagccaggcgcggtggctcacgcctgtaatcccagcactttgggaggctgaggtcggtgaaatcgcctgaggtcaggagttcgagaccagcctggccaacacagtgaaaccccgtctctactaaaaatacaaaaaattagctgggagcggtggtgtgtgcctgtaatctcagctactagggaggctgaggcaggagaatcccttgaacttgggaggcggaggttgcagtgagccgagatcatgccattgcactccagcctgggcaacaagagcgaaacaccatctaaaatatatatatatactcccaatgccaggtatttcctgagctctgtttctccccaagccctgggtccttccttagccccagacactcccagagttcccagccactcctcaaattctcagctgcttctcagctctcagctattttcttttctcaccaattttcatgaaaatggagtcccttgggggccacggaagggtgaggctgaagtatagcagagcccagggtagggaaggcagtcctagagaaatcaggcagcaagaaggatggctccgcctcaaaggactcgccccatccccaggcttcctgcgtggtggacgtcgtggacagcagcgggtggactgccctacaccatgcaggtgggtgcagcccagccctgccctgaccccgaagcccagagggtgctagacttgggggttattctgcccagggccctagggacctgacctgctgtgaagcttcctgtctcctcctttctttctttctttttttttttttgagacggagtctcactctgttgcccaggctggagtgcagtggcaagatctcagctcactgtaacatccatctcccaggttcaagcaattttcctgcctcagcctcccgagtagctgggactagaggcacctgccaccacacctggctgatgttttgtatttttagtaaagacggggtttcaccatggtggccaggatggtctcgaactcctgacctcaggtgatccacccgccttggcctcccaaagtgctgggattacaggcgtgagccaccgctcctggccttccttttctttttatgagatagggtcttgctctgttgcccaggctgaagtacagtggggcaatcatggctcactgcatccttgacctcccgggttcaaacgatcctcctgcctcagactcccaagtagctgggaccacaggcgtgcaccaccatgcctggctaatattttaaatttatttgtagatacaggatcttgctatgttgcccaggctgatctcaaactcctgggctcaaatgatcctcccacctcggccactcaaagtgctggaattacaggcgtgagccacctcacctagcctcctcctttttttcttgacatagaatctccctctgtcgcccagggtggagtgcaatggcgcaatcttggctcactgcaacctccacctcccaggttcaagcaattctcctgccttagcctcctgagtagctgggactacagacctatgccacaacacccacctaaaatttttttgtatttttagtagagatggggtttcaccatgttggccaggctcatctcgaactcctgacctcaggtgatctgcccgcctcggcctcccaaagtgctgggattacaggcgtgagccaccgtgccggcccttctcccttttttttttttttttttttttttgaggtggagtctcgctctgtcacccaggctggagtgcagtggcgtgatctcggctcactgcaagctccgcctcccgggtccacgccattctcctgcctcagcctcccgagtagcggggactacaggcgcctgccaccatgcccggctaatttttttgtattttttagtagagacggggtttcactgtgttagccaggatggtcttgatctcctgacctcgtgatccgcctgctcggcctcccaaagtgctgggattacaggcgtgagccaccgtgccggcccttctccttttttattacctactgtgtgccaggcactggagcccatcataaatcccggttaccctttgaaccacaggctattagcccattgcacagatgaggcttgatgaggcttaatgaggctgtcacttgtccgcagcaggtaaatcgtagggaatccaggtcgtctgacctcaaggagcagtcgaatgtactcctgggctttgtgaggatgaggagaggtccctagggtttaatttcctttgtggagcccctaggagataccaggaaaaccatagctccaggcagctggtaccctcataatcacctaatccaaactccttcccagagggagggaaagggacccaccgacttgaaccagaactcagcccccgacctgtccgctgtccccgtgaaattcaggcatggctttcgctgacgactcaagaaacatctgttctttcggaaactcagaataaaatagggctttgggggttttagtcactgggtgagaattctctgcagttggagtatgctgccacctagtggcggcaatgcttctggtcacaatataggagtccgttggtttttgtcactcaacagttaactgagcactctgggaggcccaggcgggcagattagcagaggtcaggagttcgagaatagcctggccaacatggtgaaaccctgtctctactaataataaaaaattaaggccgggtgcagtggctcacgcctataatcccagcactttgggagcctgaggcgggcggatcatgaggtcaggagatcaagaccatcctggccaacacggtgaaaccctgtctctactaaacaatgcaaaaaattagccaggcatggaggcatgtgcctgtaatcccagctactcgggaggctgaggcaggagaattgcttaaacccggggagtggaggttgcatagagccgagatcatgcccctgcacagcccgggcaacagagcgagaccccatctcaaaaaaaccaaccaaccaacaacaacaacaaacagttattgagtacctactgtgtgtcaggcaccgttctacgtgttgtagataaggtttgcagcaatcaaaacctcatactgcctcagacatacagcaggtattcaaacagagtttgttgactgaaaaatggatttttgtgcttaatcagactggatgtcaacctgctggaattcatacccagggattccagagaccatgcccttgtgtcagctgcacagcctcctggggagcctccctgtttccactctggtcctgggcaaatggcagtaggagggatctcttaaaatataaatagacaggccaggcacagtggtgcacgcctgtaatcctagcactatgggagtcagaggtgggaggattgcttgagcccaggagtttgagaccagcctgggcaacatggcaaaaccccatctctactaaaaatataaaaattagccaggcgtgatggctcatgcctataatcccagctactcgggaggctgaggcaggagaatcgctggaaccggggaggcggaggttgcagtgagccaagatcacacccctgcactccagcgtgggtgcagagggagactccatctcaaaaaataaaaataggtcgggtgcggtggctcacgcctgtaatcccagcactttgggaggccgaggcgggtggatcacgagctcaggcaatcgagaccatcctggctaacacggtgaaaccccgtctctactaaaaatacaaaaaattagccgggtgtggtggcgggcgcctgtagtcccagctactcgggaggctgaggcaggagaatggcatgaacccgggaggtggaggttgcagtgagccgagatcgggccactgcactccagcctgggtgaccagagcaagactccgtctcaaaaataaataaataaataaataaataaataaataaataaaattaaataaatacataaacacataaacggggccgggcatggtggctgcagcctataatcccagcactttgggagccagaggcaggaggattgcttgaacctaggagtttgagaccagcctgggcaatatagtgacattccatttccataaaaaattaaaaaaaagaattagccaggagtggtggtgcacgcctacagtcccggcggcagattgcttgagcccaggagttcaagaaaagcctgggcaacgtagcaagaccctgtctctaaaaaaataaaataatataatataaaataaaataaaaattagccaggcacggttgcacatgccttgtagtgtgggtctcattcctgtaatcccagccccttgggaggccgaggcaggaggatcacttgagcccaggagttcgggaccagtctgggcaacacagcgagaccccgtctctacaaaaagtatagggaaccacagtgcttgggactggcagtcggcagacctagatcctagatctgactctgcctcttaccccagtgggtgaccactggcctggttgggcctcagttgctgcatctgtaaaatgcaaaacttgcctttgttacaaattcctcagggcacatgggaatttctcatgaaataaaggagcagggtcacacccaggcagaaagtgcccagaaaatgtcgaagtctcaccctacccctactcttcccccttttgtttgtcttcctttcttttcttggtttttgagacaagatctcactctgtcacccaggctggtttgcagtggtgccatcatggttcactgcagccttgaactcctgagctcaagcggtcctcccgcttcagctggggactccctagtagctggggccacagacacacaccaccacacccagataatgtttgcttttttttttttttttttgtagagacagggtctcactgtgttggcccaggttggtctcaaactccagaactcaagcgaacctcctgccttggcctcccaaggtgctgggattacagggttgagctaccgcaccggacaaccttttctcttttgcagcggctggtggctgtctctcctgctcagaggtgctctgctcctttaaggcacatctaaacccccaagatcgggtaagcttctgggatctcttcagggaagatgttatgcttgaggtatgctgccaccaagtggcagtatctcaggcaccctttgaaagtctgagaaagtttgaggtgaaactcaagggcagttatataggcttctgcacctcccgggggtcagtttctcatgccatcgcatccctcctcctccctaccagtcaggcgcaacacccctcattatagcagctcagatgtgtcacacagacctgtgccgtctcctactgcagcaaggggctgccgcgaacgatcaggacctgcaaggcaggtgagcatctcccctcccagccagtccaccctatgctgtgtgaccttcggcaagacttaacctaagtaagacgatctagccagcctcctcttcccagcctggcctgggtgctgaggtgggcatgggggcttgggggatgttctcatctcctcagtagccccctcccctggtaggacggccctgatgctggcctgtgagggggccagccccgaaacagtggaggtcctgctgcagggcggagcccagccgggcatcaccgatgcgctggggcaggacgcggctcactatggcgccctggcgggggacaaactcatcctgcaccttctgcaagaggcggcccagcgcccctccccacccagcggtatgcaagccccacctccccaatgcatttgcttcttggcagcttcttgtcactccccttctctttatcgtgaatagtttcaaggtacccccgattggctgcattctaggaggtcctagagcttacccaattctactcagaacagtttcaaggagccccagggcatttagagtagtctgggagggggtctgcttctgctttcctgggtcatctgtacagtaagaactttgcctgtcctaagaagggcaccccctgctgggcaaggtggctcatgcctgtaatcccagcactttgggaggccgaggtgggcgaatcacttgaggtcaggggttcaagaccagcttgaccaacatggtgaaaccctgtctccactaaaaatacaaaaattagctagacgtggttcaagcaattctcctgcctcaccttccagagtagctggaactccaggtgcctgccgcctaagtccctcacgcctggctaatttttgtatttttagtggagtcggggtttcgccacgttggccaggctggtctcaaactcctgaactcaggtgattcacccgccttggcctcccagaatgctaggattacaggcatgagtcaccccatccagcctatcctctctttttaacagtcccaagtccctctctcagcactctacccaagcgccagatttctaccttaaacgccctgattcttggggaaatcgggagccccctacaagtccctggggcccaccaatgcccttcctgggcctgggaacagaatgcctgaccctgcttccctctctccccagccctcacagaggatgattcaggcgaggcgtcatctcaggtatggacccctaagcagtgaaggagcccctcctccctgcatccacactaacttctcccctgccccaagctctgtgagaagagaaggaagttagacctgggaaaacctgtttggaaagaatgctaccttcagggtatgctgccaccaagtggcggcagtgtgctcagcctaactcccagaactgggtgagaatactggatggggccaaattatggggctggggtgggagggcagtggggactgaggttgttgagggttggtgtcttcggggaaggaagcagatctggcctcttcccctctttcagtttttttgtgttttttttccccgaggtggagtctcactctgtcgcccaggctggagtacagtggctcgatcttggctcactgcaaccttcaccccctgggttcaagcgattctcctgcctcagcctccctagtagctgggattacaggcacccaccacaactggctaatttttgtatttttagtagagatggggtttcaccctgttggccaggctggtctcaaactcctggcctcaagtgacccacccgcctcggcctcccaaagtgctgggattacaggcatgagccactgagcgcgacccctctcctagttttttttttttgttgttgttgttgtttgtttgttttgtttattttttgagagatggagtctcgccctgtcacccaggctggagtgcaatggcgtgatcttggctcactgcaacctctgcctcccaggttcaagtgattctcctgcctcagtttccctagtagctgggactacaggcgtgcgccaccatgcccagctaattttttgtatttttagtagggtcggggtttcactctgtgttgtccaggctgctctcgaactcctgacctcaagtgatcacccaccttggcctcccaaagtgctgggattacaggtgtgagccaccgcgctggcccctctcccagttttaaagcatctctgttccacagaggagtgaaaacgtgtgggcaatgtggtctagctggggaaagaactgagagacagagaggagcagagagtaaagagtaagatctggaacttacagggagttggtcttgtctgcgctttgctgggataagtaagcggcaggaggcaggggctgctggttccatgttctcaggaagtcaggccatggctggggctggctgggttggtttactgtgggggaggctggcatggccccccgatcggcccccttcactctctctcccctcccttcccagaactctatgtccagccatggaaagcagggggcccccaagaagcggaaggcgcctccacctcccgccagcattcccatgccggtgagagatgctctgggcacgggaggaggcatggggagcccccaggcacggggaggggctctggctgagacctgggatggggcaaccttaggccccatctaaaggccgtggtggggaggggaacaggatgatcgagatgcctatgaggagatcgtgaggctgcggcaggagaggggccgcctcctgcagaagatccggggcctggaacagcacaaggaacggaggcagcaggaggttaggaggcctcggagatttgggcgtgggccagcctgggtggggtcaatgcaggcatgaagatccccctacttttctcccaccttccctcctccatctctctccctccccaccctgctgcagccacctgggcctcctcgctgttcctccaactcgccaggcgcagtcctgcctcagggcctttgcaccaccagtgtcctctgcctggaatgctctagcgcagtcctgcctcagggcctttgcaccacctgtgtcctctgcctggaatgctctagccccagatggccccacagctctttacctcacctactttatgcagtaggctcctcgccaaagacacttcccatgcccacttcccatgcccacttcccatgcccactttcttcaaaattgtaacatcaccccccaccacccccccggccaactcgctagttcactttattttttttttatttatttttggttttgttttgtttttgagacggagtctcgctcttgttgcccaggctagaatgcaatggtacgatctcggcttattgccacctccgcctcccgggttcaagcgattctcctgcctcagtctcccaagcagctgggattacaggcgcccaccaccacatccagctagttttgtatttttagtagagacggggtttcagcacattggccaggctggtctctaactcctgacctcaggtgatcctcccgccgcggcctcctaaagtgctgggattgcaggtgtgagccaccgcacccggcctctttatctccatttgcatcacttgctgctattgggcatgcatctgttttatgtgtgtccacccatttgactgtgagcctgcgagggcaggcatggctgatggtgcctgggtcacagtatgggcgtcgtcaatattgattgggtgagtgaatattcaagtgagtgtatgaatgaatggccaaaaccaggtctgccccataagaggcacccagtaaaaactttctggctgggcacggtggctcacacctgtaatcccagcactttgggaggttgaggtgggcagatcacttgaggtcaggagttcgagaccagcctggccaacatagtgaaaccctgtctctactaaaaatacaaaaaaaaaattagctgggcatggtggcaggggcctgtaattccagctacttgggaggctgaggcaggagaattgcttgaacccgggaggcagaggttgcagtgagccaagatcacaccactgcactccagcctgggtgacagagcaagactccatctcaacaacaacaaccacaacaacaacaaacaaaaacaatcttgttgagtgaatgagtggatggaacggtgcctggcatacagcaggtgcttaataagtacatagtaattgtccagaatggtgcatactggcacacacagcaggcacttaataaatacttagaaatgaatgactggtcagaatggtgcatgctggcacacagtaggtgctcaataaatactgagtgacaggtcagaacaatagctggcacaaagtaggcacctaataaataggaatgaggccgggcgcggtggctcatgcctgtaatcccagcattttgggaggctgagacaggcggatcacgaggtcagcagatcgagaccatcctggctaacaccgtgaaaccccgtctctactaaaaatacaaaaaattagccgggcctgttggcgggcgcctgtagtcccagctacttaggaggctgaggcaggaggatggcgtgagcccaagagacgcagcttgcagtgagccgagatcacaccactgcactccagcctgggggacagagtgagattccatctcaaaaaaaaagataaataaataaataaataggaatgaatgaggctcaacatacagcaggtgctcaataaatatttagtaatgagtgagcaggcagaatggtgcctggtacacagcaggcactcaatagtaatgagtgagcgggcagaattcagtaggtgctgaatagttgcacgtggaatgcgtgaatgtgcatggaatggaggctatgaagcaggaggtggggcagggaggcctcttgcccagatccaaacccctgtccctgtttctcccgtcagtccccggaggccagctccctgcacatcctggagagacaggtaggtgggaaggtggggaggagccggtcctcctgctgcccagcctttcctcccagaggcagctgagcctccactgctgctcccaggtgcaagagctacagcagttgctggtggagagacaagaggagaaggagagcctgggacgggaggtggagagtttgcagagccggctgtccctgctggaggtaggagcagtgatgagtcagggctgggctggggctgggtcggggaacttctctcctacagcagcgacaagacagtcacaccagtgcatgcacagcctcacacacgtgcaaacacacgcaccagacacatgcacccacaaacccacagtcttggctgggtgcgagggcttacgcctgtcatcccagcactttgggaggccgaggcgggcggatcacgaggtcaggagatcgagactgtcctggccaacatggtgaaaccccgtctctactacaaatacaaaaattagctgagtgtggtggtgcgcgcctgtagtcccagctactcttaaggctgaggcaggagaatcacttgaacccgggaggcgtagtctgcagtgagctgaggtcgcaccactgcactccagcctgggtgacagagcgagactcagtctcaaacaaacaaacagtcccacagtcacatgcacccatgcacatttacaaatgtgcacagacacagaaaggaccttcctttcttccccttctccttccttccttccctccctccttccttcctttccttctttcctttccttccttccttccctccttccttcctttctttccttccttccctccctccctccttcccttccttcctttccttccttccttcgttttccttcccttctttcttcctttccttcttccttcccttccttctttcttcctttcctttccttttccttcctttcttctctctttccttctatccttccttcttttttttttttttttttggacagagtctcgctctgtcacccaggctgggatgcaatggtgtgatctcggttcacggcaacctctgcctccctggttcaagcgattctcctgcctcagccttccaagtagctgggtctacagctgcacgtcaccatgtccagctaatttttgtattttttggggagtggggaggatggagtttcactcttgttgcccaggctggagtgcagtggtgcaatctcagctcgctgcaacctccgcctccctggttcaagtgatactcctgcctaccgcagcctcccgagtagctgggattacaggcgcacaccatcacacccggctaatttttgtatttgtagtagaaatggggtttcaccatgttggccaggctggtcttgaactcctgacctcaggtgaaccgcctgccttggcctcccaaagtgctgggattacaggtatgagccaccacactcagacccagaaaggagttttctctaagcatacgcatccatgcagggatggataaccactctctatgcacgtggcggagcatggttaacagcaggcacacccacaaacacacagtttacagacacgcaagaaacaacgtccaagaacacatcatcacacacgcatgcattgcacgtgcacccgtcttgtgcagtcacacacagacaacatgcccacaaatacatacacatgcaacaaatatttcttttttttttttgagacagggtcttgttctgttgtccaggctggagtgcggtggcacgatcatggctcactgcagccttgactttcccggcctcaagcaatcctctcacctcagcctcccgagtagctgggaccacaggcatgtgccaccacacctggctaatttttttctttttggagagatggggactcactatgttccccagtctggtctcgaactcctggcctcaagtaatcctcccatcttacaggtataagccaccaagccccaccagtatttctgaaaacacacaattatgcaaacatgtatacatatagaaaaccatacacacaaacacagagatccacaggcacattcaaaacacaaccacacatacaccagactaaaactcaagcatgaagccggaaacggtggctcacgcctgtaatctcagcactttgggagcctgaggcgagtggatcacctgaggtcaggagtttgagactagcctggccaacatggggaaaccccatctctactaaaaatacaaaaattagccgggtgtgctggcgagctcctgtaatcccagctactcgggaggctaaggcaggagaatcgcttgaactcaggaggcggaggttgcagtgagccaagatcacgccactgcactccagcctgggcgacagagcgagactctctcaaaacaaatcaacaaaaagtcatgcatgtaatctcacatagtcacaggaagggaggggcccccaacccacaacactatacccacacgtatggtcacaaagacacacctccagccagctctttgcatgccaaatggatactgtcgcatccactctcatgcagacaaacacacccacaggtaaccacagcctgccccgagtcccctcacccaggagggaaacgcccatggcacataggccaggaagctgggggatgctggcatacaccatgcatctgataaggagttaataaccaaaatatgtaaggaattaatgcaactcaatacccaaaaaacaacctagttttaaaaatgggggcaggctcggtggctcacgcctgtaatcccaccactttgggaggccaaggcgggtggatcacctgaggtcaggagtccgagaccagcctggccaacgtggtgaaaccacgtgtcactaaaaatacaaaaattagccaggcgtggtggtacatgcctgtaatcccagctactctggaggttgaggcgggagaatcacttgaatctgggaggcgaaggttacagtgagccgagatcgtgccatggcactccagcctgggggcaaaaaaaaaaaaaaaatagggccaggcacagtggctcatgcctgtcatcccaacactttgggagactgaggcaggaggatcgcttgaacccaggagttcgagactagcctgggcgacgtgacgagaccgcatctctgaaaaaaaaaaaaaaaattaaaaattagccaagtatggtgttgcacacctgtagtcccagctgcttggaaggctgaggtgggaggattgtttgagcccagaggttggaggctgcagtgaactatgatcgcaccactgcactccagcctgggtgacagagtaagaccctggctccaaaaaaaaaaaaagtggcacggggagtgggtggcaaaggacatggaaggtgctcactaaatccttgtgggccaaatgcagccatctggtgctcgtgggagacatacaggtatgtgaacagcccagtccccactggagtcttggtggggacacacgggggctgagagcagaaccccgagctggactctgctccctccccccagaacgagcgggagaatactagctatgacgtaaccaccctgcaggatgaggagggtgagctgcctgaccttccaggtgagcccccacctccccacgcactcccagccgccttgtcccctggggccctggaagacggagcctctgggtgtgggggagtttgaagctgggagggaggtttgtactcatccgttttttaaattctgcttggctgagcctgccctgggaaccctgatccaccactccagccccccacctcctgtccccctgtggcccaggtccccagggcctgactctgcgtccccctccaggggccgaggtgctgctgtccagacaactcagtccgtcggcccaggaacacctggcctcgctgcaggaacaggtggctgtgctcaccagacagaaccaggaactgatggagaaggtccaggtagggaaagtgaggctggggacagatctgaggacctagggctggttccctgaggtcagggtgggcagggaaggtggcaaggctgccctgtgtccccacggtcacatcaactcctgccagactcctgccccccactccactccccagatcctggagaactttgagaaggacgagacacagatggaagtggaagctttggcagaggtcatccctcttgccctctatgactctctccgggccgagtttgaccagctacgcaggcagcacgctgaggccctgcaggccctgaggcagcaggagacacgagaggtccccagagaagagggggcagcctgtggggagagtgaggttgctggagccacggccaccaaaaacgggccaacccacatggagctaaatggctcagtggctccagaaaccaaagttaacggagccgagaccatagatgaggaggctgcaggagatgaaaccatggaagccaggactatggaagctgaggccacgggagccgaggccacgggagctgaggccacaggagccaaggtcacagaaacaaaacccacaggggctgaggtcagagaaatggagaccacagaagaagaagcaaacatggaaactaagcccacaggagctcaggccacagacacagagaccacgggagtggaggccatgggggtggaggccacaaaaacaaaagcagaggaagcagaaatgcaggcctacggagtgggtgctgggcaagcagagcccccagtcacagggaccacaaacatggaggccacgggctctagggccacagggatggaatccacaggagtcagtgccacaggtgtggagaacccaggggtagaggccacggtcccggggatctctgctggccccatcctacatcctggtgccgcagaggcctcggaaaagcttcaagtagagctggagaccaggatccgtggcttggaggaggctctccggcagcgggagcgggaggcagctgcggagctggaggcggccctggggaagtgcgaggccgcggaggccgaggcaggccggctgcgagagcgtgtccgcgaggccgagggcagcggggccagcgggggcggtggcggtgacaccacacagctgcgggcggccctggagcaggcccgggaggacctccgagaccgggactcccgcctgcgggagctggaggcggcctcggcctgcctggatgaggctcgggccagccggctgctggcggaggaggaggcgcggggcctgcgggccgagctggcccagcgggaggaggcgcggctggagcagagccgggagctggaggttctgcgggagcagctggccacggccagggccacgggggagcagcagcgcacggcggccgcggaactgggccgggcacgggacgccgctgaggcccgagtggctgagctgcctgcggcctgcgaggaggcgcggcagggcctggccgagctgcgggaggcctccgaggccctccgccagtccgtggtgccggcctctgagcaccgccggctgcaggaggaggccctggagctgcggggccgggcagccagtctggagcaggaggtggtggccacgggcaaggaggccgcccggctgcgcgcggagctggagcgggagcgtgtgtgcagcgtggcgctctcggagcacgaacgcatcgtgggcaccctgcaggccaacgtggcccagctggaggggcagctggaggagctgggacggcggcatgagaagaccagcgcagaggtcttccaggtgagcagggctggtcaccacccgggccccacccccattggccacgtggcggcctgttttagccccgcagccttgaggtgttttgaacccatcagttttacttgaacagacctactttattttatttatttatttatttatttatttatttttgagatggagtttcactcgtgtcgcccaggctggagtgtagtggtgtgatctcagctcactgcaacctcctctttcccggttcaagtgattctcctgcctcagcctccggagtagctggaattacaggcacctgcccccacgcccagctaacttttgtatttttagtagagatgggagttcaccgtgttggccaggctggtcttgaactcctgacctcaggtgatccacccacctcagcctctcaaagtgctgggattatgggcatcagcctccgcacctggccttgaacagacatttgaccctgcagccatcctgacctcttggaattttccacttgtgttttctctctttctttctctttatttctccttccttcctctctctttcctttctttcttcatcccccttccctccccccttccccttcccttcctttctttttttttttttttcagacagggtgtggctctgtctgaaaagtcacccagtcacccaggctggagtgcagtggcacaatcatagctcactgcaacctccacctcctgggctcaagtaatcctcccacctcagcctcccaagtagctggtaccacaggtgtgcaccaccatgctcgtctaactttttaattttttgtaaagacagggttttgccatgttgcccacgctggtctcaaacacctgagctcatggccgggcaccgtggctcacgcctgtaatcccagcactttgggaggccaaggtgagtggatcacctgaggtcacaagttcgagaccagcctggacaacatcgtgaaaccccgtctctactaaaaatacaaaaattaggttggcattgtggcacgtgcctgtaatcccagctactggggaggctgaggcaggagaatcgcttgaacccgggaagtggaggttgcagtgagctgagattacaccactgcactccagcctaggcgacagagcaagactctgtctcaaaaaaaaacaaaaacaaaacaaaaacaagcaaatagtagccaggcatggtggcacctgtggtcccagctacttggaaggccgaggtgggaggatcacttaagcctgaaagattgaggctacagtgagccatgatcgcaccaccgcactccagccaggagtgcaggtccggagcaacagagcaagaccctgtcttaaaaaaaatccaaaaacaaaagaacaaagtagaaggatcatatgaattctggggtctagcatcattggagtcttagtgtcctgagagtcatgcgtgggcttgggccacaggtgcagcgtgaggccctgttcatgaagagtgagcgacacgcagccgaggcacagctggccacagcagagcagcagctacgggggctacggaccgaggcggaaagggctcgccaggcccagagccgggcccaggaggctctggacaaggccaaggagaaggacaagaaggtgggtgccccctctcccacactcagtcagggaggcatccactcagcaaaggttggggccaatctacgaaggtcctcactgcaagggccttggaaaatcaacccattttccagaagggaaactgaggctcagaaacggaaggggacctggttacagcctctgacaagtcagacacacacaggctgctgttccaggtaccaattataaccacagttacatttattttatttttttacttgagacggagtctcgctctgtcgcccaggctggagtgcagtggcatgatctcggctcactgcaacctctgggttcaagcaattctcgtgcctcagcctcccgagcagctgggattacaggcatgcgacaccacacccagctaattttttatatttttagtagagatggggtttcgtcacgttggccaggctggtctcgaactcctgagctcaagtgatccgcctgcctcagcccccaaaagggctggggttacaggcgtgagccactgcgtctgtctccacagttacatttattgagtgcttactgcatgccaggccctgtggactggatgcatttagtcacatccagttctcacaggataggggcttttattatccccatttgaggaaacagaagcacagagaggtgaagtcacttgcctaaggtcacacagccatgcagtctttcagctgggtttgtacccacgttcccacgtttcgttcctaaacaatactaatgatgataacaacagcctccaggtgttagattgggaatttttcacacattacctttttttattgttgttttgtttttttctgaggcagagtcttgctctgtcacccagactggagtgcagtggcgtgatcttggctcactgtaaactctgcctcccgggttcacgccattctcctgcctcagcctcccgagtagctgggactacaggcgcctgccaccacgcccggctaatttttttgtatttttagcagagatggggtttcaccatgttagctgggatggtctcaatctcctgacctcgtgatccgcctgcctcggcctcccagagtgctgggattacaggcgtgagtcaccgcgaccggcctcacacattaccatttttaatcttcctgcaacgctaaaagccagaaagctttttttttttttggcagagtctcactttgtcacccaggctggagtgcagtggtgcaatctcagatcattgcagcttcgacctcctgggttcaagcgatcttcctgcctcagcctcctgagtagccaggactacaggttacaggtgtgtgccatcatgcctggctaatttttttgtttctttcttttttttttgagagaaagtttcactctgtcgctcagggtgaagtacagtggcatgattttggctcactgcaacctcacctcccgggttcaagagattctcctgcctagcctcccgagtagctgggactgcaggcgagtgccaccacacccagctaatttttgtatttttagtagagactgggtttcaccatgttggccaggctggtctcgaactcccgacctcaggtgattcagcctcccaaagtgctgggattacagtcatgagccaccgtgcctggcctgtttttttttgcttttgtttgtttgtttgtttgtttgtttggtaagagatggggtttcaccatattgcccaggttggtctcaaactcttgagctcaagcgatctgtctgcctcagcctcccaaagtggtaggatgacaggcgtgagccaccgcacctggtttcagaaagtatttttgtccccattttccagataagcaaaccaaagctttaagagatgaagtgagtggctcaaagtcacgcaacatgtcactggacaggagacgagacacccagagtcccaggcgcttcagcataaagaatgacccagcctcgactcactgtgggaccttagaccagacacttcacctctctgagcttcagtttcccctctgtaaagggagggcaaaattgcagttaggatgatggtttatctgtagcctggtttcttcccttgcacactgtggacataggagcgggatcatttcctgggctggggccatctgggcattgtaggggactgagcagcgtccttgacctctacccactccaagccaagagctcctccaagtcgtgacaaccacagatgtccccacacaacacccagtgtccccttggggggcagaattgcctcaagttgagaaccccagatctatagtaataataaggcccggcatttattgagtgcctactgttgactaggcacagtttaaacttaatctctgtgcaggatcacagcaactactaagttaagaactattggccgggcgcggtggctcacgcctgtaatcccagcactttgggaggcccaggcaagtggatcacctgaggtcaggagttcaagaccagcctggccaacatggcgaaaccccgtctctactaaaaatagaaacattagccagatgtggtgatgggcacctgtagtcccagctactcaggaggctgaggcaggagaattgcttgaacctgggaggcggaagttgtagtgagctgagatcacaccactgcactccagcctgggcaacagagcgagactctgtctcaaaaagaaacaaacaaaaacaaaaaaatgtgaaaaccaaccttagcttgtgggttgtataaaaacaggctgtgttggtaaccataagcatctaaaatataaataaatacaattaaaacaggctgtgggccagacgtggccctcaggccagagtttgctaaccccagggacgggaccttcccttgaaagcctttatccctggcctcttcctgcggctgcagagaggtcctcagcccccagctctgggcttagggtgatcgctgacagcacctgcaccctcagatcacagaactctccaaagaagtcttcaatcttaaggaagccttgaaggagcagccggccgccctcgccacccctgaggtggaggctctccgtgaccaggtgaaggatttacagcagcagctgcaggtaaggactgggccacgcaggggccaggggaccatcagggtggaggagtccaaatatttaccaatcagcacagcgcaggtgggaatcccaggagaggggctggggtaggcaggtggggtccacatcacatgcacggcatggccaggaaatacttcctttattttttttgagacagggtctcactccatcgcccaggctggagtgcagtggcacaatctcagctcactgcagcctccaccttccgggtttaagcaattttcatgccttagcgtcctgcgtagctggaattacaggcacgcaccaccacacccagctaatttttgtatttttagtagagatggagtttcaccatgttggcaaggctggtcttgaactcctgggctcgcataagcctcccaaaacgctgggattacaggcataagccactgctcctggccgccctctgccttttttttggacataggatcttgctctattaggctggagtgcagtggtgcaatcatagctcactgagcagcctcaaactcctggcctcaagcagttctccacctcaacctcccaaagtgcctggccatacatatatatatatatatatatatatatatatttttttttttttttttttgagccagtctcactctgtcacccaggctggagtgcagtgacacgatcttggctcactgcaacctctgcctcccggctcccgggttcaagtgattctcctgcctcagcttcctgactagctgggactacaggtgtgagccaccttgcctgggaaattttttgttttttttgagtctcactttgtcactcaggctggagtgcagtgcacgatctcagctcactgcaacctccgcctcccgggttcaagcgattctcctgccttagcctcctgagtagctgggactacaggcatgtgccaccactcccggctaattttttttacttttagtaaagacggggtttcaccatgttagccagggtggtcttgatctcttgaccctgttatccgcccgccttggcctcccaaagtgctgggattacaggtgtgagccactgcacctggccaatttttgtatttttagtagagacgggattttaccatgttggtccaggctggtcttgaactcctgacctcaagtgagccacccacctcagcctcccaaagtgctgggattacaaatgtatgccactatgccccgccatattttcatattttagcagtcggccatcaacgtacaggcttggggtgcaaagggtgctttttggtgtgttttgctcagtggggaggtgctcctgctcttctgagcgccccttcctcatgcccacaggaagctgccagggaccactccagcgtggtggctttgtacagaagccacctcctatatgccattcaggtgagtggcccagctcctgggtacccggtggctttgggcataccactgttgctctctgagcctcagtttccccttctgtacagtgggaggctggtctggggagaggttcgtggcatgtgggagcccccctgtgtgcatttccctcctggctggcttggtctatgggagtggtggagggacttggggcagccatggagggtatactcagggtcttcctctactcccccaaccctagggccagatggatgaagatgtgcagcggattctcagccagattctgcagatgcagagactccaggctcagggccgctgagaaaggccaggcccagtggctacactgaccacacccacgcagggacctcacccccctgcaggccccttgcagaccggcttcacttggcttcacttggccctatccaggcccatgcacttggagaccagcctggttccctgcccgaccacccccagctggctccatcaccccacctggtctctgcacgcacacactggtcagtctggacccgggccgtgactgcccctcccccaccaccggagactgtgattccctgtgtcctccacatccagacgccagcccaggaataaaggcattctgtgcacagggccaacgcgtgccgtctcgttgctgggcttccactgcggggagcggagagggtggcccagaaaaggaagcgctcacacccctccccacctaccccacgccacaaatcagccatcaggataaaccccatcttttttctttcttttttttttttttttttgagatagagtctcgctctgccgcccaggctggagtgcagtggcgccatctcggctcactgcaagctctgcctcctgggttcacgccattctcctgcctcagcctcccaagtagctgggactacaggcgcccgccaccacgcccggctaattttttatatttttagtagagacgggtttcaccatgttagccaggatggtcaatttcctgacctcatgatccacccgccttggcctcccaaagtgctgggattacaggcttgagccaccgcacctggcctcttttatttttttttatgcggagtctccctctgtcacccaggctggagtgcagtggagtaatctcgactcactacaacctctgcctcccgggttcaggtgattctcctgcctcagcctcccgagtaactaagattacaaggcatgtgccaccacacccggctcatttttgtatttttagtagagacagggttccaccatgttcgccaggctggtctcgaactcctgacttcaggtgatccatccgccttggcctcccaaagtgctgggaatacaggcatgagccatggtgcccggcctttggataaactccatcttaatgcaatatttcaaaaaggcaaaatgggtgcaaaaaaagtgcatgctgaactaagtatggaaatgttaaagaaaggcaggcttggccgggtgcggtggcccatgcctataatcccagcattttgggagaccaatgtgggaggatctcttgagcccaggagttgaagaccagcctgggcaacatggggaaacccccatctctatcaaaaatacaaaaattagctgggcatggtggcgcgcacttgtggtcacagctactcaggaggctgaggagggaggaccgcttgagtgcagcagttagaggctgttgcacttcagcctgggtgacagggcaagaccctgcctctaaaaaaagatttaaaaaaaaaaaaaaaggaaagaaagatactttcctaaatcctaaggctggccatggtggaagccccctacccccagcctctccctgccccttggcaactcccccgaaatccccacgggtttcttggcatttttcagcaaacagaggggaggcaggagtgggagcggggatccccgagcctgtccagcctgcccctgggggtttccttgttcctgggcatcctgatcgctgggatatctgcggtggcagctgcctcccctggcctgcgctcctgtgtctctctctgtctctcttctccatgtctctgtctctctctttttttttttttgagatagattttcgctcttattgcccagactagagtgcaatgatgcgatctcggctctctgcaacctccacctcccgggttcaagcaattcccctgcctcagcctccggaatacctgggattacaggcacgtgccaccatgcccagctaatttttgtatttttagtagagacggggtttcaccatgttagtcaggctggtctcggactcctgacctcaggtgatccacccatattggcctcccaaagtgctgggattacaggcgtgagccaccgcacccagtctccacgtctctgtctctatctcttggtctccatctgtctgtcttgctgttttgtctgtctccctgtgtctttgtctgtgtcttcctcctctcttatctctgtctctctgtgtttcttttgctctgtctctgtctctctcatgtccccatctcccatctctctgtctctttctatctctgtcttcttttttttttttttttgagacggagtctggctctgtcgcccgggctggagtgcagtggcgccatctcggctcactgcaagctccgcctcccgggttcacaccattctcctgcctcagcctcctgagtagctgggactacaggcgcctgccaccacgcccggctaatttttttgcatttttagtggagacggggtttcaccatgtcagccaggatggtcttgatctcctgaccttgtgatccgcccgcctcggcctcccagagtgctgggattacaggtgtgagcccccacgctcagcctttttttttttttttttttttgacacagagtctcactctatctcccaggctggagtgcagtggcgtgacctcggctcactgcaacctcctctcactgcaacctccgcctcccaggtttaagcgattctcccacctcagcgtcccaagtagctgggattacaggtgcgcaccacaacgcccagctaattcttgtatttttagtagagacggggtttcaccatattggccaggctggtctcgaacttctgaccttgtgacccgcccgcctcagcctcccaaagtgctgggattagaggcgtgagccaccacacccggccctctgtcgtcttctcttatctctctgtctctctttctgtgtctgtcatctccccgtatctctatttctgtcttcctgtcttctttctgtctctcttttgtctctctttctccatctctgtcattgccccatcagtctttttgttgttgttgttgttctttttgagatggagtctcactctgtcacccaggctggagtgcagtggtgtaatcttggttcactgcaacctctgcctcccaggtttaagtgattctccttcctcagcctccagagtagctgggattacaggtgcctgccaccacgcccagctaatttttgtatttttagtagagacagggtttcaccattttggtcaggctggtctcgaactcccaacctcaggtgatccatctgccttggcctcccaaggtgctgggattacagccgtgagccaccgtgccccaccatctctctatctctgtctatcctactctctcatctctgtctctctgtctctgtctctcatcttcccatctgtgtctctctttctctgtcttcctcccttatctctgtctctgtgtctctctcatttccctatctctgtcttcctctcttatctctgtccctctgtctctcttcctctgtctgtctgctctctgtgtttctctttctgtttccatcatctccctgtctctctctgtctctgtgtcctcctcctctcatctctgtctctgtctctctcattcccctgtctctctctgtctctatcatctccctatctatctctgtgtcctcctcctctcatctctgtctctctctgtgtttctgtctctgtcatccccctttctctgtctctgtcatctccctgtctctctatctctgtgtcctcctcctctcgtctctgtctctctgcctctctcatctgtatctctctctgtctctgtcatctccctgtctctgtctctctctatctctgtgtcctcctctcatttgtctctctgcctctctcatctgtatctctgtcactttctctgtcatctccctgtctctctatccctctatctctgtgtcctcctctcatctgtctctctgcctctctcatctgtagctctctctgtctctgtcatctccctgtctctctatccctctatctctgtgtcctcctctcatctgtctctctgactctctcatctttgtctctgtctctgtctctgtcatctccctgtctatctccgtgtcctcctcctctcatctctgcctttctcatctctgtgtctctctctgtgtttctgtctctgtcatgcccctttctctgtctgtcatctccctgtctctatctatctctgtgtcctcctcctctcatctctgtctctctcatctgtatctctctctgtctctgtcgtctccctgtctctctatctctttgtcctcttcctcttgtctttctctctgcctctctcatctgtgtctctctctgtctctgtctctgtcatctccctgtctctgtctctctctctctgtgtcctcctcctctcgtctctttctctctgcctctttcatctgtgtctctgtgtctctctgtcatctccctgtctatctctgtgtcctcctcctctcgtctctgtctctctgcctctttcatctgtgtctctctgtctctgtctctgtcatctccctgtctctgtatccctctatctctgtgtcctcctcttcttgtctctgtctctctgcctctctcatctgtgtctctctctgtgtctctgtctctgtcatctccctgtctctctgtgtcttccttctgtcttctctgtctctctgcctctctcccccatctctgcctctgtctccctccatgtccctgagcccctgcctgcctgcctggggtttcccccgcttcagggcagcggaaggaaggccagcaggacatgctgtgctgggaaaagccagcaggtctccacttctccctttcacagcctcctcccccgcccccaccctcggggccttccgagcaggggtggcctgtgctccccagggggctggggctcctccacaccctaattcatctccctagcggccccacgagccccaccagtgagtcagacctgaaggaagtcggggagggggcgggccttgaccctgggctgggctttcccctgggcaggtcccaagtcctcacctcccctctcaagtctcccacgacgttcccacccactcctgagagcagagctggccgcagccatgaccccgcagcttctcctggcccttgtcctctgggccagctgcccgccctgcagtggaaggaaaggtatgtggggcccctgggggactggggggcccaggcagacggacatgacacgaggactggcctcggatcatgtctggggtgggaaatcacatcctcccgtgcccaatggtgggatggggttaccctcccattgtacagatggaggaactgaggcacagagaggcagagtgccacattgggggtggaaggatgtcaccttgtgggtgatagggactggcagtcacagctcagaggtatccatagagctacacagacatagctacacagacatgcgaatttgagtcacactcattcctttggtttctttttggttttgttttttgagacagagtctcactctgtcgcccaggctggagtacagtggcaccatctcagctcactgaaacctccatctcctgggttcaagcgagattctcctccctcagcctcccgagtagttgggattacaggtgcccgccaccatgcccggctactttttatatttttagtagagatagggttttaccatgttggccagggtggtcttgaactcctgacctcaggtgatccacccacctcgggctcccaaagtgctgggatgacagatgtgagccaccgcgcccggccgacattcattcattttgcactagagaacatctccatgtccttgaagacaaaatggttacagcagggcatggtggctcatgcctgtaattccagcactttgggaggccagggcgtgaggatcgtgaggccaggaattcgagaccagcctgggcaacatagtgaaaccggaccccaccaatctgtacaaaaaattaaaaaattagctagatgtggtggcacgtgcctgtagtcccagctacttgggaggctgaggtgggaggataatttgagcccaggaattggaggctgcagtgagctatgattgtgccactgcattccagcctaggtgacagagtgggataccttgtctcaaaataataataataataataatttataggctgggtttggtggctcacgcctgtaattccagcactttgggaggccaaggcaggtggatcacctgaggtcaggagtttgagaccagcctggccaacatggtgaaactccctctctactaaaaatacaaaaattagccaagcgtggcagtacatgcctgtaatcccagctactcgggaggctaagaatcgcttgaacccgggaggcgggggtggcagtgagccgagatctcgccactgcactccagcctaggcgacagagggagactccctctttaaaaaaaaaaaacaattacaaaagagagaacacggtaaaatctctctctcttacccgagttcctctctgtagatgcttaaacctcagcttccctatctggaaaatgggctagtagtcctcacctagatggattgcagtggggataaaagatgacagatgacttttgtccatgtacctatttattccgaaagcctttattaggcacctaccatgtacctggtgctggctggcaacgtggcaggagcccagcgcacgggagggctatgacaatctgggggtaaaccagaagctcactctttctgtcttcctccagggcccccagcagctctgacactgccccgggtgcaatgccgagcctctcggtacccgatcgccgtggattgctcctggaccctgccgcctgctccaaactccaccagccccgtgtccttcattgccacgtacaggtcggagagcctggaagggggcctcagggacactggacttcctggagagcccagaactctggccctgagagccctggggtcaggaaaactggagaccccgacatcctgaaccccaggcctatggaattctagggcggccccgtccaatagaaatatactttctgggccaggcacagtggtgcatgcctgtaatcccagcgctttgggaggccgaggtgggcagattgcttgaggtcaggagtttgagaccagcttgggcaacgtagtgagacactgtctctacgaaaaattttaaaaattggtcaggtgcagtggctcatgcctgtaatcccagctactccggaggctgaggcaggagaatagcttgaacccaggaggcggaggttgcagtgagccaagatggcaccattgcactccagcctgggcaacagagcaagactccatctcaaaaaaaaaaaaaaaaaactacttcctgggttgggcacagtggcacatgcctgtaatcccagtactttgggaggctgatgtgggaggatcacttgaggtcaggagtttgagtccagcttgggcaaaatagtgagaccctgtctctaaaaacaatttttaaaattagctgggcatggccaggcgcggtggctcacgcctgtaatcccagcactttgggaggccgaggtgggcggatcacaaggtcaggagatggagaccaccctggcgaacacggtgaaaccctgtctttactaaaaatgcaaaaatttgccaggtgtgatggcacgcgcctgtagtcccagctactcgggaggctgaggcaggagaattgcttgacccaggaggtggacgttgcagtgagccaatattgcatcgctgcactgcatcctggtgatagagtgagaccccgtctcaaaaaaaaaaaaaaaaaaaaaaagaaaagaaaagaaaagaaaagaaaagaaaaaatttcgaaaaagaaaaaaaaattagctgggcatgttggtacttgcctgtagtcccagctactctggaggctgaggtgggaggatcacttgagcccaggagtttgagaccagcctgggcaacatagcaatatcctgtctgtacttaaaatcaaaaaaattagctggatgtaatggcacacatctgtagtcccaggtacttgggaggccgaggtgggaggatcacttgagcccagaagttcaagaccagcctgggcaacatactgagacccccccccatctgtagaaaaaaaatttaaaattagccaagagtggtgatgcgtgcctgtagtcccaaccgctctggaggctgagacagggaagatcccttgagccaggagttcaaggctataatgagctaggatcatgccactgcactccagcctgggcgccagagggagaccctgtcatgaatgaatgaatgaatgaagggatgaattaatgaatgaatgaaggaatgaattaatgaatgaatgaaggaatgaattaatgaatgaatgaacggatgaatgaatgaatgaatggatggatgaatgaatgaatgctgacatcccagaaacctttagaatcccggaccctagcatctagcttgggttgtaatccccgacctgaaccatcaggggcaccgtgatgttggggcccatgccctgcccccggggggtggcacggccaccaccaggaccccaccccgggatccccatccgctgccccctcctgttcctgcctctccttggggtcccgggtcaggcccggcagtaggaggtgctgaggccacaggcactccctgaggcgctcagcgagccccaccctgtgcaggctcggcatggctgcccggggccacagctggccctgcctgcagcagacgccaacgtccaccagctgcaccatcacggatgtccagctgttctccatggctccctacgtgctcaatgtcaccgccgtccacccctggggctccagcagcagcttcgtgcctttcataacagagcacatcagtgagtgggggcggcagtgggggcgggggcggggctgccgtctccttccagctccccccaccccacctcccacctgtcctccagtcctgcggctgcaccttcacacttaagcaaaaatctgaccccttcttccccctcctctaccagtacgtggagcacccccatcattgacagcccagtcccctccatcctgagccctggcctccacagtctgtccttcccacagcagccaccagagggcgcctgagagcacctgagtcagggcacgtccctctgcctacagccctccatggctcccacctgccttggggtcaaagcccaagtccttcctactgcccaccaaaccctggacaacctgccctgtctcctccatgccctcccctcctccctgtctcccccttgctcactctgctgtggccacatgtgattccttgatgttcaacatgccaggaatagttctgccccagggcctttgcatgggcggtgccctctacctggaacaccttcccccaaatgtccccatgacttattccctcacctccttcgggtctctgtgcatacatcacctcctcagtaagacctctcctgagtagattattaaaaattgcaagctctggctaggctcagtggctcacacttgtaatcccagcactttgggaggctgaggcaggccgatcacctgaggtcaggagtttgagaccagtcctggccaacatggtgaaaccctgcctctactaaaaatacaagaattagctgggcatagtggcaggtgcctgtaatcccagctactcagggggctgaggcacgagaatcacttgaacccaggaggtggaggttgccgtgagctgagattgtgccactgcattccagcctgggcgagagagcgagactctatctcaaaaaacaaaacaaaacaaaacaaaaattgcggccactgccattcctgcactccccagctttcttccctattctgtgtgacctatggatttgtttatttcctgtcttccccctgatggattgtgagttccatgaggacaggggtaggtcagttaaggtcactgttttgtcccctctgtggcagccccaggcacacagtttctcaataaatatttgttggttgagccaggcatggtggctcacaactactcgggaggctgaggcaggagaatcgcctgaacctgggaggcagaggttgtagtgagctgagatcacgccgctgtactccagcctgggtgacagagtgagactccgtttcaaaacaaacaaaatatatacataatatgttggttgaatgaatgagtgaatgaatgaatgactggacttactgtcccctgaccctgcttcctgcttgtccgtcagtcaagcccgaccctccagaaggcgtgcgcctaagccccctcgctgagcgccagctacaggtgcagtgggagcctcccgggtcctggcccttcccagagatcttctcactgaagtactggatccgttacaagcgtcagggagctgcgcgcttccaccgggtgaggaggatgagggggaggctggaaagggtggtgcctggcagagggaatggtttttaccaagactagcaggtgtgctgggctcttgcacatagcttgcgattccgggtgcattgaataagagcagtccagcaatctgattcctaggcctctaccgaaaaggatggaaagcagggacttgcacaagctgtcgcacacccgtttttgttgttattgttttgagacagagtctcgctctgtcgcccaggcagtgacacaatctcggctcactgcaaactccgcctcccaggttcaagcgatgctcctgcctcagcctctggagtagctgggattacgggcacgtgccactatgcccggctaatttttgtatttttagtagagatggggtttcatcatgttggccaggctggtctcgaacttctgatctcaggtgatctgcctgcctcggactcccaaagtgctgggattacaggcgtgagccaccgaattgttcactttattgattgattgattgaaacaaggtctagctctgtcacccaggctggagtgcagtggcgcgatcttggctcgctgaaacctccgcctcccaggttcaagtgattctcctgcctcagcctcctgaatagctgggactacaggcgcccaccacgcccggctaatttctgtattttcagtagagatgggattttgccatgttgcccaggctggtctcaaactacggagcttaggtgatccacctgcctgggcctcccaaagtgttgggactacaggtgtgaggacttcatctggccagaattagccattttaaagtgaacaattctggctgggcagggtggctcacacctgtaatcccagcactttgagaggccaagttgggaggattgcttgagtccaggagttggagaccagcctgggtaacatagtgagactcccatctctacaaaaaatttaaacattagttgggtgtggtgacacacacctgtacccccagttacaagaggctgaggtgggaggatcacttgggcctggaagattgaggctgcagtgagccgtgttggcaccactgccttccagcctgggtaacagagagagactctgtctcccaacttaaataaattaaataaaataaaaagcacggttaggctaggtgcagtggctcatgcctgaaatcccagcactttaggaggccaaggcaggcagatcacttgaggtcaggtgaaaccccatctctattaaaaatacaaaaattggcctggcgcggtggctcatgcctgtaatcccagcactttgggaggctgaggcaggcagatcacgaggtcaggaattcgagaacagcctgaccaacatggtgaaatcacagctctactaaaaatacaaaaattagccgggtgtggtggcgggcgcctgtaatcccagctactcaggaggctgaggcaggagaatggcttgaacccgggaggtggaggttgcagtgagctgagatcatgccactgcactccagcctgggtgacagagtgagactccgtctcaaaaacaaacaaacaaaaattagccaggcatggtggcgggcgcctgtaatcccagctatctgggaggctgacgtgagaggatggtttgagcctggaggcagaggttgcagtaagccaagattgccccactgcactccagcctgggcaacagagtaagactgtctcaaaaaaaaaaaaaaaaaaaaaaaaagcatggttaatatagtgggaccaggggtaaagggaggtatggggtcctatcccagaggtcctggtttagtcccagggaggagaaagaagaggattatagggatcagggatgtcctgatgaacaaagaccctcctgggtgagacatccacaggggctagtgtggtccaggaaggattcgtaagagaggtggctctgggggccacacagacagaggccgggattgggaggagcccatgatgctatttggggtggggccgcacagctggggccagagtcctggactggagcctgcagggggcagggaggactgcacgctccgttgtgtggttctgtgcacagtggcccctctccatcttctggttctagtgacctgacgctctctcttctctcaggtggggcccattgaagccacgtccttcatcctcagggctgtgcggccccgagccaggtactacgtccaagtggcggctcaggacctcacagactacggggaactgagtgactggagtctccccgccactgccacaatgagcctgggcaagtagcaagggcttcccgctgcctccagacagcacctgggtcctcgccaccctaagccccgggacacctgttggagggcggatgggatctgcctagcctgggctggagtccttgctttgctgctgctgagctgccgggcaacctcagatgaccgacttttccctttgagcctcagtttctctagctgagaaatggagatgtactactctctcctttacctttacctttaccacagtgcagggctgactgaactgtcactgtgagatattttttattgtttaattagaaaagaattgttgttgggctgggcgcagtggatcgcacctgtaatcccagtcactgggaagccgacgtgggagggtagcttgaggccaggagctcgaaaccagtccgggccacacagcaagaccccatctctaaaaaattaatataaatataaaataaattagccaggtgtgatgttgcgcgcccacagtcccaactacttgggaggctgaggtgggaggatcacttgagtccaggaggttaaggctgcagtgagctgtcgtcacaccactgccttcatgcctgggcaacagagcaagaccctggtttttttgtttgtttgtttgtttgttttaatcatagttgaggccgggtgcggtggctcgcgcctgtaatcccgacgccgaggcgggcagatcacgaggtcaggagttcgagaccagcctgaccaacatggtgaaacccggtctctactaaaaatacagaaattagctgggcatggtggcctgagcccgtaaccccagctactcaggaggctaaggcaggagaatcgcttgaacctgggaggcggaggttgcagtgagctgagattgcaccactgcactccagcctgggcaacagagcaagactccgtctcaaaacaaaaacaaaaaaaataatagttgaaatgaagactccagctgggtatggtggctcacgcctgtaatctcagcactttgggaggccaaggcaggtggatcacttgaggtcaggagttcaagaccagcctggccaacatggtgaaaccctgtctcgactgaaaatacaaaaattagccaggcgtggtggtgggtgcctataattccagctactcgggaggctgaggcaggagaattgcttgaacccgggaggcagaggttgcagtgaactgagatcgcgccatcgcactccagcctgggcgatggggtgactaagactccgtctgaaaaaaataaggaaatgaagactcctcttttcacttagaggagatccagcgaggacttagccctaaaccaaaggacacagaaaccacaaatccccactcccatagtgtcagggctggaccaggggacgtcatgggcctggggatgccagggtggggtggcagggattccgcctggagtgggacagtagaatccattcaggggcaggtgcggtggctcacgtctgtaatcccagcactttgagaggctgaggcgggtggatcacaaggtcaggagttcaagaccagcctggctaagatggtgaaaccccatctctactaaaaataataatacaaaaaattagccaggcgtgggtatccgcctgtagtcccagctactcgggaggctgaggcagaagaattgcttgaacccaggaggtggaggttgcagtgagccaagatcgcgccactgcattccagcctgggtgacagagcgagactcgatctcggaaaaaaaaaaaaaaaaaagaatccattaagaatccattcagattagcagttaggttggttcgcccagatgtcagcctcattgaggatagacaccaataaggtatgagtggctctggggagatttaactgaacagtgggcaaggaaggcagccaggccctgaaggagagagaaacagccttgggcttgtctgtgggttccacctgggtctccagtcaaaagtcacctcctccgagaagccttccctgactaccccatctgtggcaggtagagtaacactccccaatcccgcaaagacatccatgtcccaatctccagagctcatgagtattttgcctgatgcagccaaaggaactttataggagtgattacattaataatctcaaaggtctttaaagatgaaagatctttcatcaaattaatgaaaatgggccgggcgcagtggctcacgcctgtaatcccaacactttgtgaggccaaggcaggagaattgcttgaggccaagagctccagaccaacctgggcaacatagtgagacccccatctctaaaaaaataaaataggccaggcatggtggctcatgcctgtaattccagcactttgagaggccgaggtgggtggatcacgaggtggggagttcgagaccagcctgaccaatatggtgaaaccctgtctccactaaaaaatgcaaaagttagccaggcgttgtggcacacacctgtagctccagctactcgggaggctgaggcagaagaatcacttgaacccgggaggcggaggttgcagtgagccgagatcgtaccactgcacttcagcctgggcaacagagcgagactgtctcaaaaaaaaaaatagtaataaaataaaataaaataaaaataaaataataaaataagttagccaggtgtgatgtcgcgtgcccatagtcccagctaatcaggagactgaggtgggaggatctcttgagcccaggagatcaaggctgcagtgagctatgatctcaccactgtactccagcctgggcaacagagcaagaccctgtctcaaaaaaaaaaaaattagccgggctcagtggctcacgcctgtaatcccagtactttgggaggcccaggtgggcagatcacaaggtcaggagttcgagaccagcctggccaatatggtgaaaccctgtctctactaaaatacaaaaaaatattagccagacatggtggcatatgcctgtagtcctagctaatcgggaggctgaggcaggggaatcgcttgaacctgggagggggaggttgcagtgagccgagatcgtaccactgcaccccagcctggcaacagagcgagactccgtctcaaaaaaaaaaaaaattaaaaattagctgggcttggtggctcacagctatagttccagctacttgggaggccaaagtggcagaatctcttgagtccaggaggaagaggctacagtgagctgtgatcacatctctgcactccagcctgggtaacagagaaagactccatttcaaaaaaaaaaaaaaaaaaaaagccaggcacggtggctcacgcctgtaatccagcactttgggaggctgaggcgggcagatcacgaggtcaggagatcaagaccatcctggtgaacacggtgaaaccctgtctctactaaaaatacaattaaaaaaattagctgggcatggaggcaggcgcctgtagtgcccgctacttgggaggctgaggcaggagaatggcgtgaacctgggaggcggagcttgcagtgagccttagatcgtgccactgcactccagcctgggagacagtgagactccttctcaaaaaaaaaaaaagaaaaaacaagtatttctaaaaaatttaatagatgccaggcacagtggcttacgcttgtaatcccagcactttgtgaggctgaggcggctgaattgcttgagctcaggagtttgagaccagcctgggcaacatagtgagaccccatctctacaaaaaatacaaaagttaggcaggcatggtggtacatgcctgtggtcccagctactctggaggctgaggcaggaggattgcctgagcccaggaggttgaggcttcaataagctatgattgtgccactgcactccagcctgggtgagacagtgagaccccgtctcaaaaaaaaaagattaatagggatggggtctcaccatgttcctcagactagattccaactcctagtctcaagcaatcctctcaccttggcctcccaaagtactggaattacagggctgatgagccaccatgctcagtccattttttatttctgacctgtaaaactataataaatgtgtgtcgggcagaggcagtggctcatgtctataatcccaacattttgggaggctaaggtgggaggatcacttgaccccaggagtactagaccagccatggcaacatatcaagaccctgtctctcaaaaaaaaatttaaaatttagctgggcatggtggcatgcacttttagtcccagccacttgggaggctgaggtgggaggatctctgagtctgggagcttgaggctgcagtgactatgatcatagaaccgcactccaccctaggtgaaaaagcaagacgtgtctcagaaaaaaatataaataaataaaacaaatgcatgttgttttcagacactgagttggtggtcaattgttacaacagccataggcccctcaagcatcacctacaattgaccctttccatcactatccatggtcaaaagataaagctgcaaccttggccaggtgcagaggctcatgcctgtaatcccagcactttgagaagctgaggcaggtgaatcacttgagctcaggagttccagaccagcctggccaacatggtgaaaccccgtctctactaaaaatacaaaaattagctgggcgtggcacacgcctgtggccccagtgacttgggaggctgaggcaggagagtcacttgaactcgggaggtggaggctgtggtgagctgagatcgcgtcactgcactctagcctgagcaacacagtaagactgcatctcaaaacaaaacaaaacaaaaatgctgcaacctatatagttcagagatctgaattgggttttctttgcaattctggaatcaggcaacacctcatttcatcaaatcgaattagctactaaaacaccaggtgtttggtctaggtcttgctgccctctgcgcagaaagccaatcaccgaggcaacaaggattgccagggaggaatgctttatcctgccgctgcagtcaatgagaaggggtggtaaagtctcatatgtctccctgaccaactaaaattggggagtttatatagctggggaatgggagaaaacaaattcagggagggtgttaaggaagtaatcttgatggatgatggggtctggcctctcattgtctggatgtgatgatctgatgagtttcagttccttgcctgatggtcagtttcctgaggaaggaactgagatgagacaaatgtaagtttcaagttttaagactagggaggatccatttctgtgtttattcaaataatcataagtattcgttttatggaacaattggaccagtttcagaatgtttccatgagctgagcagacaacattaggggttctttttctttcttttttaaagtctgttaaaccttccattttttttttttcccgagacagagtctctctctgtcacccaggctggggggcagtggcgtggtcttggctgactgtaacctccgcctcctggattcaaatgattctcttgcctctgcctcccaagtagctgggactacaggtgcccatcatcacacccggctaatttttgtatttttagtagagatggggtttccccatgttggccaggctggtcttgaactcctgacctcatgatcaacccgcctcagcctcccaaagtgctgggattacaggaatgaggcaccatgcccggccaaaccttccacttttgcaaagcaggttttatttatttattttgagacggagtttcactcttgttgcccaggctggagtgcagtggtgatctcagctcactgaaaaagaggttggttttatagacagaaaaaggctgagtaaagcagaaatagaaaacaaaaagtggattggtcttttcaaagttacttttcttgtcaagtttagagcaaaggagactatcgtgctggctaaaacaggcctgttcagggatttttttttttttttttttttgagacagtctcgctctgtcacccaggctggagtgtagtggcacaatcttggctcactgcagcctccacctcccgggttcaagcgattctcctgcctcagcctcccaagtagctgggactacaggcgtgtgccaccctgcccagctaatctttgtatttttagtagagacagggtttcaccatgttggccaggatggtctcaatctcctgacctcgttatccacccgcctcccaaagtgcagggattacaggcatgagccacagtgcctggcctttttttttttttttttgagacagaatctggttctgttgcctaggctggagtgcagtggcatgatctgggctcactgcaatctccgcctcccaggttcaagcaattctcgtgagtcagcctcccaagtagctgggattacaggcacccaccaccgcaccccgctaattttttgtattttagtggaaacggggtttcgccatgttggccaggctggtcttgaactcccgagctcaggtgatctgcctgcctctgttcatggatttgactattccctctctttctctctctccctctctctctctctctccccacttccttccagttctcgatttcttggaaaaccagaaaaacaacttagtttcagcttggtgtaaaacttccgcatgagggacttcattttggtttagtcttttgggcctagtgcaggagctcagtccaaacccatggcttcctgtaaactttatttaacaccattccttgtcccatattattgtcttcctggtgccaggaaaaggggtccctagctgggtgtggtggctcacacctgtaatcccagcactttgggaggctgaggtgggtggatcacctcttgaacacctcaggagttcaagaccagcctgaccaacatggagaaaccccgtctctactaaaaatacaaaattagccggacgtggtggcacatgcttttaatcccagctacttgggaggctgaggtaggagaatagcttgaacctgggagacggaggttgcggtgagccgagattgtaccattgcactccagcccgggcaacaagagcaaaactcctcaaaaaaaaaaaaaaaaaaaaaaaaaaaggaaggctactcagttacaaagtagggcgtcctcagaaaacaagaggaggaacgccttgtctttgttttaaggtttttatttttattttatttattgatttatttttgagatggagtcttgctctgtcacccaggtacaatggcacgatcttggcacgatcttggctcactgcaacctccacctgccaggttcaagcgattctcctgcttcagtctcctgagtagttgggattcaggcatgtaccactgcgcccagctaatttttatatttttagtagagacgaggttttaccgtgttggccaggctggccttgaactcctgagctcaagtgatcctcccacctcggcctcccaaagtgttgggattacaggtgtgagccaccatgtacaaccggttttttcttatataggggtcttatctgtgtgaaagctatgtccacgtgtaggtgggctgaccgcgtgacaaaacgtagtactttgtcgacttaaagaaagttatcctggctgggtgcagtggctcacacctgtaattgtaacactttggtaggccgaggccggcagatcacttcagcccaggatttccagaccagcttgggcaacatggcgaaaccctgtctctacaaaaactgccaaatattagccaggtgtggtggtacctatagttccagctaactcggaaggctgaggtgggggatcgcctgagccgggaagtggaggccacagagagccatgattgcgttactgcactccagcctaggtgacagagcgagaccctgtctcaaaaagtatacatacatatccttgccattttagtgcctaagtacattacaccatgactataaccatattttctttttttttttttgagatggagtttcactcttgtcacccaggctggagtgcaatggcgccatatcgactcaccgcaacctctgcctcccaggttcaagtgattctcctgcctcagcctcccaagcagctgggattacaggcatgcaccaccatgcccggctaattttgtatttttagtagagacaagatttcttcatgttggtctggttggtcttgaactctcgacctgcaccaccgcacctggctaattttgcatttttagtagagacggggtttctccgtgttggtctgattggtcttgaactcctgacctcaggtgattcgcccacgtcggcctcccaaagtgctgggattacaggcgtaagccaccatgcccggtatctttttcttttttttctctttttttttttttttgagatggagtctcactctgtcgcccaggccacagggcagcggcacaatctcgatctcagttcactgcaacctcagcctcctgggttcatgcaattctcctgcctcagcctcccaagtagctgggattacaggttcccgccaccacgcccggctaatttttgtatttttagtagagatggggttccaccatggtggccatggtgaccaggctggtctcgaactcctgacctcaggtgatccaccctccttggcctcccaaagtgctgggattacaggcatgagccaccgcgcctggcgactataacgatcttaaaagcatacattgctatgcaatatcaggacatctggaccttccattgttgtagtagtgtgtcctcctaggcatttgtaagacgttttctcaattgtaaacatcttatgaccctggctcgtgactggcagcgaatgtgccttgttaattttaagatggagttgatttttggccaggtgcagtggctcatgcctgtaatcccagcactttgggaggcagaggcgagcagatcacctgaggtcaggagttcgagacctgcctggccaaaatggtgaaaccccatctctactaaaactacaaaaattaggcaggtgtggtggtgcgtgcctgtaatcccagctactcgggaggttgagacaggagaatcacttgaatcctgaggtggaggttgcagtgagccaagatcgcaccactggaggcagaggttgcagtgagccaagatcgcaccactgcccgtcagcctgggcaacagagcaagactcctcaaaagataaataaataaacaaacaattgccacagcaacatcaagaagttaccctatatggtctaaaaaagggaggtatgaataatccaccccttgtttagcatatcatcaataaatcaccataaacatgggcaaccaccagcccttggggctgctttgtctgtgaagtagccattcttttattcatctactttctaaataaacttgtttttgctttgcactgtggactcgccctgaattccttcttgcacgagatccaagaaccctctcctggggtctggatccggacccctttcctggaacaatctgacacagaggaaacgtccatgaaaggtggggaggaggctggggaaggaggctggggaaggaatgggatgggaagtcctcgttaaggggaaggcacaggtgggcaatggagggacatttgggagacactgcgtatgtttaggaagttggtttggagcctgatctttaagtcaatgtctgtgactcaagagtcgtccagggtcctcttaagtcaccctatgtgtggccccaaccccatgtgagagttgcgggcccaggaacgatgtgtggattcccagagcccagaatacaaggcaggcgcataatacatatttgctgaataaaagaatgaagaacaagaggtcacgttacaaaattttaacgagccgctgcccgcttctagggggcgcagcgcactatacaaaattctccaattccacatggctcccggaatccttatttcgcgctactcaggttgcaactccggagggaagacgctgggacttccagcttgataggcggggattggaaccaatgaaagaggtctgctgtgtatgctgcagccaataatagcggccgaaggaagtgacgtttgcggaagtaaggcttccgtcggaaaagctcgataattacccagcctaaccatttctcaggtgcttgcgaggtgatcagaaggcaaagatgtcggagcgaaaagtattaaacgtaagtgttgggcgactggggcttttcaatcggagcaggacatcccggaactccgggagagggaggagcttcctgagatctcttctttggaacccttctttcccagcggccttccgcgagatggggcttcccagactcctccctagactcctccccatcgccttccgtcgggggggtgggccttcgctaagtctcccttctgggctggggtgtagttagtcacctgcggggcgtggcttgggcttttacccaatcaccaccagatagggttttttttctgggggcggggcttccttaaatgctggcggccgtgttttgccctcttcttgaggggcgtggctctgagaagccccgccccacttggggactgtaaccaatcgtgtactttgggtggggtggggtggggtggcgcgtgtgtgtgtgtgtgtgtgtgtgtgtgtgtgtgtgtgtgtgtgtgtgtgtgtgtgtgtgtgtgtgtgtgtgtgtgtgtgtgtgtgtgtgtgtgtgtgtgtgtgtgtgtgtgtgtgttttgttttttttactggggtctggtcatgcagataacctctgccttacagtggccaagattttactggggtctggtcatgcagataacctctgcctgacagtggccaagattccagactcccagaagaaaagcagaggttcagtataaactatactgttggcacacttctgttttttggttttttgagatggagttttgcgcttgcttcccaggctggagtgcagtggcacgttcttggctcactgcagcttctgcctcctgggttcaagcgattctcctgcctcagcctcctgagtagctgggactgcaggcgcccgccaccatgcctggttaattttttttgtattttagtagagatgagatttcaccatgttgcccagggtggttttgaactcttgatctcaggcattccacccacctcatactcccaaagtgctggaattacaggcgtgagccaccgcgcccggccccacgcaggtctttctaggagagcagtctcaggcttgctgtaggaactcctgggaaacaggagccctgggatacaaagggagtgtgagtatggattatgacagatacctccactgcaccactggaaaataaagcactttgtgtttggagcacctactgggtgccagacactgcaaagagcactttatcccccttgcctcaaggaatgcgtgcaaagactcttggagacagaggacagtgtgcgcatttcacagaggagtaaactgagccctgcaggtttcagctcctcaggattcagatccagggagatgactctgtaggaaacggatgtagtatcgtgattgggaggctgagctaacagagtcctggtttaccctctacagaattgctggggagttgggactcctcggggaactcggtctcctgcctgaacaacagaagtgctaagcaaagcttaacctctacaaagggcagggcatgatggctcacgtgtgtaataccagctctttgggaggccaaggcaggtggatcacctgaggtcaggagttcgagactagcctggccaacatggtgaaaccccatctctactaaaaatacaaaaattagcggggagtggtggtgggcgcctgtaatcccagctactgtagaggctgaggcaggagaatcgcttgaacccaggaggcggaggttgcagtgagccaagatcgcgccactggactccagcctgggcaacaagagcaaaactccgtctcagaacaaaaacaaaaacaaaccctggctttttagagcttcccgtgtagacagcatttcatgtgtattgtcatgactggtatttaggagaattaaatgcgtcctgtataactccactaggagagagtcaggaagcttgtgcctggcctccctctgactgtactgagtcctgcgagtcctccctgcctgtcgcggaacctggggtgggcttggggacccccgacacagctccccagagccccttccctctgccatgtcctgcccctgcttctgaaaataactcccccaacgtttccttcctcccctgcagaaatactacccgccggactttgacccatcaaagatccccaaactcaagctccccaaagaccggcagtacgtggtgcggctgatggcccccttcaacatgaggtgagcaccccctgcgtgaccccacacaccagtcatggctgaaggacgcagtgcctggcatccacagaggtgactcgtccggtgttaagaccagatcactggtcttagacattgtcctggctcagacattgaccattccaaccctccttcgcctcaccacttgggattaagctttggatcttttagagccctccagccagtgcctgccttgagatcatggtggttagtaaacgtgtgtgcagagaggataggacgccacagagatgcagccccatagatatatttcagctcctccaacagccaagctcgttcctaccccagggcctttgcacacactgctgcccctgcttggaactctctccctctactttctttctttctttttttttttttgttgagacagagtcttgccgtgttgcccaggctggagtgcagtggcgtgatctcagctcactgcaacctccacctcctggcttcaagcgattctcctgcctcagcctcccaagtagctgggattacaggcgtgcaccaccacgcccggctaatttttgtattttcagtagagttggtgttttaccatgttggccaagctggtctcgaactcctgacctcaggtgatctgccctccttggcctcccaaagtgctgggattgcaggcgtgagctgccgcacctggccttctccttctacttacacatggcaggctcctcttgtctgccataggtcatggctccaatctcacccctccgggaggcctccatcatcccctcacggtgcccagatcttgccttttgtagcacttcagaattactgtatttcaccaactctcaaccccataccttttcatgctctagcatatctgaaatcacgcacctaacgaggaaagagacatctgggtcagtgaaattcggttcatgcccatgtgttgttggcctgtctactcctccccctcattcattcatttattcattcaacactcatttattgggcacctgctgtgtgccagggtctgtgccgagcgccaggaacaaagtccctggcctcatggagcccacagtctaatgggaagtggagaatagtggtagtcaggcaggtgcacgggcccccgaagtcaggcaggagagagcccctggggcagtggcgcaggagggagggctataggtagctggggtacggtgacatcaggcaaaatactggtggcgctgaggtctgaggatgaagggtgtcgccggccatgagactgtaggagcagaggccttgagctgggactgagctgggggtgtttgcaggatcagacaggaggcgggcgtgctgggctggggagcagagcccggagtaggaggggaagaggggggtggggcagcatttttctgtgtggcatctttcctcctggagggtggggtgccccgtaagcacaaagattgcttctgggagtgcatgacaggcaggcctcacctactcagggggcttcccaagcaggcgacccttggactgagccccaggaagatatgaatgagaacacgaagttctcaggtagaggaaatttggacacagggtggggcagcctgcctcttgaaggagggagctccccgttgctggaggcaagcaagcagtgatcttgcaggatgccgcagggacagcctgccagtgggagccagcgtcccaagacagctcacatccctacatgctgccccgcaggtgtaagacgtgcggagaatacatctacaaggggaagaaattcaatgctcggaaggagacggtgcagaacgaggtctacctgggcctgcccatcttccgcttttacatcaagtgcacgcgctgcctggcagagatcaccttcaaggtaggtgagacggccggccaggccggtccctctcccccagcacacctcagatcagggcgggccctggggttccttaactccaatcctctccatccagggaatctcatttcagtttatccccaagaaacagacaacagtttgggggagatgttcatggcagcattctaaataaaggcaaaaagacagaagcaacctagatagataataataagggatgagaagaacaaattagcatgcaggctgggcatggctcacacctgtactcccagcactttgggcggccaaggcgggcagatcacctgaggtcagaagttcaagaccaccctagccaacatggcgaaatgccatgtctactaaaaatacaaaaattactgggcatggtggcggactataatcccagttactcgagaggctaaggcaggagaatcacttgaagctgggaggcagaggttgcagtgagcgaagattgcaccgctatactccagtctgggtgacagagcaagactccaactaaaaaaaaaaaaaaaaaaagccaggcacagtggctcatgcctgtaattccagcaggttgggaggccaaggcaggaaagagagcccctgaggtcaggagtttgagaccagcctggccaacatggtgaaaccccgtctctactaaaaatacaaaagtgagccaggcgtggtggctcatgcctgtaatctcaggtacttgggagaccaaagcaggagaatcgcttgaacccgagagggagaggttgcagtgagccaacattgcgccattgcactccagcctgagcaacgaaatgaaactctgtctcaaaaagaaaaaaaaaagtagcgtgcaatggaatattacacagccaataaaaattgcaatttgacttttatttgttaccttgagaatttaaggaaagactgaagataacttaaaattttctcttcctatgcttaagtactctttgaatacttttttgccataagctttttttctttgattaaaaaaacattttgggctgggcgcagtggctcacagctataatcagcactttgggaggccaaggcaagtggatcagttgaggtcaggagttcgagaccagcctggacaacatgatgaaaccccaactctactaaaaaaaaatacaaaaataggccgggcgcagtggctcacgcctctaatcccagtactttgggaggctgaggcaggcggatcatgaggtcaggagatcgagaccatcctggctaacacagtgaaaccccgtctctactaaaaaaaaagcagaaaaaaattagccaggcgtggtggcgggtgcctgtagtcccagctactcgggaggctgagacaagagaatggcgtgaacccaggaggcggagcttgcagtgagctgagatcgcgccactgcactccagcctgggcgacagagcgagactccgtctcaaaaataaataaataaattaataataataataatattttggctgggtgcagtggctcacgcctgtaatcccaacactttgagaggtcaagggagaaggatcgcttaaatccaggaattcaagaccagcttgggcaacatagtgagatcccgtcagtacaaaaaaatataaaaattagctgggcatgatggcatgcgcctatagtcctagctacttgggaggctgaggcaggagaatcaattgagtctgggaggccaaggctgcagtgagccatgatttcactgctatactccagcctgagtgacagagtgagaccctgtctgcaaaaaaacaaacaaaaactttttttgaaatacctgaagatttacagaaaagttccaaagatagtacagataattctcacctaccccctcaccaacttccccgaatattagcatcttatataaccagggtacatctgtcacagtaagatactaagggtggggccaggcatggtggcttactcccagcgctttgagaaggcaaggcaggaggattgctggggaccagaagttcaagactagcctgggcaacatagtgagaccctgtccgtgtctacacacacacacacacacacacacacacacacacacacaaattttaattaaaaaaagaaactaaaggtggaatgttaccattaacattgtaggctgtggctgggtgcagtggctcatgcctgtaatcccggcactttggaggccaaagcaggaggatcggttgagtccaagagttagagaccagcctgggcaacatggcgaaaccctgtctctaccaaaaagaaatttaaaaattagccaggtgtgatggtgcatacctgtagtcccagctactcggcaggctaaggtgagaggattgcttgaacccgggaggctgaggttgcagtgagccatgatcctgccgctgcactccggcctgggcaacagcacgagaccctgtccccaaaaaaataaaaaacatagtgttactattagcatttagaccaaaggtagatttcagtttttctgctaatgtcacttttctgttccagtgtgtaatttaagataccagggtgtatttagcctctctattcaataaacaaaaacaggggcatgctgtatacatatttgtacatgtgatttataatcaaagaaaaggtgttaataaatacaaagggcagaaatcacaacatgtgcagaaccttggagatttttttttttttttgagacagggtctcactttgtagccaaggctggagtacagtggtgtgatctcagcctcccaggttcatgtgattctcatgcctcagcctccagagtagctgggattacaggcatgcaccaccttgccctgcctaattttttgtatttttagtagagacagggtttctccatgttggccaggctggtcttgaatacctgacctccagtgatccacctgcctcattggagagtttgtttgcagtcatgttaagggtagggagtggaggatgcagggaggcagtgggcagatgagaagagtcttaaagtccatgccagggagttgggcatttttgcccatggagatgggaggagcactaggaagaaatctcaccagtcaaagcaataagacaagaaaaagagaaggtagtagaaccagtaaaaatcagagagaaggggccctgatctgctggtggtactttagaagattctagtgcctggggatgtaggagctgatgtctgtctatcctccctgcagacagaccctgaaaacacagactacaccatggagcatggagccacgcggaatttccaggctgagaagctcctggaggaggaggagaagagggtgcagaaggagcgggaggacgaggagctgaacaaccccatgaaggtgagtcgggggccatgtaggtgttcatgggcgctgtgtgtgtgggtgtgtgtgtgtgccaatggttgtgcccttcctgcctcaggtccccaaggaaggaagatggggtggggggcgtggttggtaaaactttaagatgtccccaggaggccaggcatagtggctcatgcctgtaatctcagcactttgggaggctgaggcgggaggatcacttgaggtcaggagtcctagaccagcctggccaatgtggcgaaaccctgttcctactaaaaattttaaaacttaacactgggcgcagtggctcacacctgtaatcccagcacttttggaggccgaagtgggtgggtcacgaggtcaggagtttgagaccagcctgaccaacatggtgaaaccccgtctctactaaaaatacaaaaattagccaggcatggtggcacgcttctggaattacagctactcaggaggctgaggcaggagaatcgcttgaaccggggaggcagatgttgcaggaagccgagatggcgccactgcactccagcctgggtgacagagtgagattctgtctccaaaaaaaaaaaaaaaaaattagtcaagcatggtggcgcatgcctgtaatctcagctacttgggaggctgaggcaggagaattgcatgaacccgggaggcagaggttgcagtgagccgagatcaaaccactgcactccagcctgggcagcaaagcaagactctgtctcaaaaaaaataaataaataaaagaaattatgttcacttccaataggacaattttgtattttctcagaaatattaaaaggagccatgcatggtggcttgaacctgtagtcccagctactttaggggttgagacaggaggatcacttgagtctaggagtcaaagaccagcctgggcaacatagtgagactctgtctctataaaacattaaaaaattagccaggtgcttgccaggcgtggtggctcacacctgtaatcgcagcactttgggaggccaaggcaggtggatcacaaggtcaggagttcaagaccagcctggccaagagggtgaaaccccgtctctactaaaaatacaaaaaattagccgggcatggtggcagacacctgtaatcccagctactcgggaggctgaggcagagaattgcttgaactcaggaggcagaggctgcagtgagctgagatcatgccactgcactccagcctgggtgacagagcaagattctgtgtcaaaaaaaaaaaaaaaaaaaaaatcagccaagtgctttgggaggctgaggcaggcggatcacctgaggtcaggagttcaagaccagcttggccaacacggcgaaaccctgtctctactaaaaatacaaaaattaaccaggcgtggtggcacgcgcctataatccaagctactcaggaggctgaggcaggagaattgcttgaacccaggaggcggaggttgcagtgagccaagatcgcgccattgcacttcagcctgggcaacaagagtaaaactctgtctcaacaacaacaacaaaaattaggcaggtgtactggtgtgcacctgtggtcccacctactagggaggctgaggcgggaggatcacttgagcccaggaagttgaggctgcagttagctatgatcacatcactgcactccagcctggaagacagcaagactgtcgcaaaaaaaaaaaaatatatatatatatatatatatatatgtacacacacatatacatatatatacatacacatatatatataaaacagatttttaaatgactgtgttccctgctgtcccctcctgcttccatatttcccatccattcttatctattcctggacccacccacccctgccaaatgtgagttttctgagcaagccacatcagaccagatacaacattttccatggccatgcagagcaacagggagggaaatgagccttggcaagggtttggtgtgtgcctgggcctgtcgcactgctgtctgtgtgtgaatttagttacctccacactgacagcaaggggctcttaccctggtgttagtcagctattgctacataacaggttatcccaaaacttagtgactgaaaacaacaaacatttattatcccacagtttttgagagtcaggcatccagaagcagctgagctggatggttgtggcttgggggctcccatgaggttgcagtcaaggtgttggccagggcagtatcatctgaaggctggactggggctggaggagccactcgcaaactggctccctctactggctgttggctgtcagcctcagttcctcgctgtgtggggagctgcttgagcaacctcacaacatggcagctgcgtaccccagagcatgtgacccaagagtgagagcaaggaggaaggcctgtgcttttacatcctagtctcagaagttacgtgccattatttctgtcatattccattagagcaagtagcttgtccagcccctgctcaaggggaggggagtcacctccaccccttaaatggaggagcatcagagagtttgtggacatacttttaaactgtcagaattgccatttttccaaagggtaaatacaacaaggtcacagcactgggaagcagccaggcaggattcactcccaacctgcctggctccaaagccacttctcagggacccgtggccaccagactcgcctccctcagcctcagtttccgtttctgtaaaatgggggttgtgaggattaaatgagatggcatatggaaacctcttagcccagggcccggtgtacagtaggtgctcaggttgtcttttacaatttttccttaatattattatttttgagatagagtctcgctctgtcacccaagctggaatgcattggcacgatctgagctcagtcaacctctgcctcctgggttcaagtgattctcctgcctcagcctcccaagtagctgggattacaggtgtgtgccaccacgcctggataatttttgtatttttattatttatttatttttttgagatggagtctcactctgtcacccaggttggagtccagtggtgcaatcttggttcactgcaacctctgcctcccgggttcaagcaattctcctgcctcagcctcccaagtagctgggattacaggcacatgccactacgcccagctactttttgtatttttagtagagatggggtttcgtcatgttggccaggctggtcttgaactcctgacctcaagtgatctgtctgcctcggcctcccaaagtgctgggattacaggcgtgacccataacacccagcctgtatttttagtagagacagggtttcaccatgttggccaggctggtctcgaactcctgatctcaggtgatccgcccgctccggcctcccaaaatgctgggattacagacgtgagccactgtgcctggccaaatttttccttattattcttactgaaagatggcaccaggccagaaatccaggccacctgggtccagagccagcctctttccaccccaccctgccccagggctcagatcccggctccaccactgctcagccccatgtggtcactttccctccccagacctgagtgttctcacctgtgaaatggacacagcgctgggcatgggcagggggttccctgagcaggatggaaacgtgggggtaggggttcctcccgtggcccgcagtggcccccgaggccagacagggtttgccccgtggtgcgatccccatgcactcagccccgccgccccgcgcccgccaggtgctggagaaccggaccaaggactccaagctggagatggaggtgctggagaacctccaggagctgaaagacctgaaccagcggcaggcgcacgtggacttcgaggctatgctgaggcagcaccgcctgtcggaggaggagcggcggaggcagcagcaggaggaggacgagcaggagaccgcgtgagtcagggccggcccaacccagccccacctcgcagcctctgccccggcaggcgctgcctctgccccagaccctttccccgctctctggagtgtcgcctttgcaaggacccctttcccaccgcccatctcactttctcccttgtggcgtctctcgagggggtcccaggccactgccgggcacggtgacttagcacgtggtcgcccgcatggctgcggtttgtcacagcgagaggacacagcagattcagcaaaggggaaaggcatgtgtggtgtgtcgggggccaggccttccagatcctctcctggtggagcttcgcaggacgcgcctcatcccctagcaccagcctggaggactcgagaaaggcgccatcactagggaagctcctagagacccagcgtggggttcctatggggcctggtcccacagcccccgctgcctcacccatgccgggattccagactccagaggaaagcaggggtcacgcataaaccatggtgtttgcaggaacagctgaagccccagagcccgtcccatccatgagggtgggaggcccccagcacaggctcccggacacccaccaagggacgccctcaccagccgccttctgaggacacagcctcaggcctcctgggtgaacacttttctttttttttttttttttttttttttttttgagacggagtctccctctgctgcccaggctggagggcagtggcgccatctcgctcactgcaagctccgcctcccgggttcatgccattctgcctcagcctcccgagtagctgggattagaggcatccgccaccaagcccggctaattttttgtaatttttagtagagatggggtttcaccgtgttagccaggatggtctcgatctcctgacctcgtgatccgcccgcctcggcctcccaaagtgctgggattgcaggcgtgagccaccgcgcccggacgacgcttttctttttctttgagacggggttttgctctgccgcccaggctggagtgcagtagtgcagtcatagctcactgtagcctccatctcccgggctcaagcgttcctcctgcctcagccttctgggtagctgggaccacagggacacatcaccatgcccagctaattgtttttatttctgtagagacaggacctcgctatgttggacaggctggttttgaactcctggcctcaagcgatcctcccaccttagtctcctgaagtgctggatgacacgtgtgagcccctgtggttggctggtgaatgcctttgacgccgaccacctctgagcccgcgtgctgatcccctcctttcctggtgcctcatctcccctccctcctttagaatctgagctgtaaggacagggacgtggtggcctctcctgtgtccccagggcttccagcaggtaggttctggtaggttccacgtcagtgcctgatgggtgtgcagagcagcgataccgtgcagaacagtgttgggagcctgcgttcatcctgcaccttccgggtgccgggcgtggctgtaacctcactacccacacagccctgggggtcagtgtgatcttcatcatggaggggactgaggtccagggaggtccaggcatgagccccaccaaggttaccctccaggctccatccagacaggctggttccggcatccaggcacttaaccacaccactgccctcggtggacacggaaaagttaatgtaaaaaagtagaaggggccgggcgcagggtctcctgcctgccatcctgcactgtgggaggctgaggcgggcggatcacctgaggtcagcagttcgagaccagcctggccaacatggcgaaaccccatctgtactaaaaatacaaaaacaaattagctgggcgtggtggcagatgcctgtaattccagctgctccagaggctgagacaggagaattgcctgaacccgggaggcagaggttatagtgagccgagatggtgccactgaactccagcctgggcgacagagcaagattcctcctaaaaaaaatgaaaattaaaaagtagactaggtgcggtcggtggctcacgcccgtaatcccagcactttgggaggctgaagtgggcgtatcacctgaggtcaggagttcgagaccagcctggccaagatggtgaaaccccgtctctactaaaactacagaaattagctggacatggtggtatgtgcctgtagtcctagctaacatttttaatttttttagagacggggtctcgctatgttgcccaggctggtctctaacccctggctcaagcgatcctcccgtctcagcgtcccaaagagctgggatgacaggcatgagccactgcatctggcccctttaatctgttttatgtttaaatagaggaagtggtaaccactgggttaaggaagtcccaatgggtgctctgccctcacggagctcactgtgtggggagggagagggacaaggagaccaatacccaggacaacatccatctgggtgagagagaagccaggatgcgtgagcttgaattatgaggatgagcttctcagaggaagagcgtcttgcattgggtattgaaggtcgagtaggagttcaccaagcgagtgcttggcaaaggggtcatcccaggtaaggggatgtaggcccctgatttttaaaatcctttttgcagagatgcggtcttgctgtgttgcccaggctggtctcatgctcctggccttaagcatttctcctgccttggcctctaaaggcacagggattacagacatcagccaccatgtctggccccaagacatttttctaaaagacattttctttgaagctatatcccctgattagagttctcacactgtggttctcacataaaccactcccagaattagagaccggcctggccaagatggcgaaaccccgcctctactaaaaatacaaaaattagctggacacggtggtgcgtgcctgtagtcctagctgctcggtaggctgaggctggagaatcgcttgaacccaggaggcggaggttgcagtgagccaagatcacgccactgcactccagcctggacaacaaagactccatctcaaaaaagaaaaaaaaaatacaaaaattagccgggtgtggtggcaggcacctgtaatcccaggtacttgggaagctgaggcaggagaatcgcttcaacctgggaggtgggggttgcagtgagccaagattgcgccactgcactccagcctgggcaacagagcgagactctgtctcaaaaataaaatgaaataaaatttaataaggcataggaacacgcctgtggacccagctactcaggaagctgagtggggaggatcgcttgagcccaggaggttgaggttgcagtgagctgtgattgtgccacttcaccctccctgagtgacagagtgagaccttgtctcttaaaaaaaaaaagtaatctgtgctccccctactccctcccacccctgctcactgagggcaggaagaggtctccaggcacccaggcccctcgccaccccagcaggtacatcccaggcactgttccccaaacagagcacgtccaagttcccatcttccatcccacagggccctgttggaggaagccagaaagcgaagactgctggaggactccgactcagaggatgaggctgctccctcgcccctgcagccagcccttcggcccaaccccaccgccatcctggatgaggtaagtggggtgcctgagtcctgggggctcccaggtgaactagggacaactgaagccaggggtcagcttgactttttcttttgttttttgtttttgttttttgagacggagtctcgctctgtcgcctaggctggagtgcagtggcacgatcttggctcactgcaacctctgcctcccaggttcaagcgattctcctgcctcagcctcccgagtagctgggactacaggcacgcgccaccaagcccagctaattttttgtatttttagtagagatggggtttcaccatgttgggaaggatggtctcaatctcttcacctcgtgatccgcccgcctaggcctcccaaagtgctgggattacaggcgtgagccaccatgcccgaccagaacttgactttttcttaaaaggccagtctgcaccctaactcctccaccctgtggctgtagcccaaaacacccatgatcaggtgtaaataagtgggtgttgcctggtgccaataaatctttatttataggcggggtgcagtggctcatgcctgtaatcccagcattttgggaggccaaggcaggaggatcgcttgaggccgggagtttgagaccagcctgggcaacaaagtgagaccccttctttacaaaattacaaaaattagtcatgggtggtggtgcatgtctgtggtcccagctgtttgagagactgaggcaggaggaccgcttgagcccagaaggtcaaggctgcagtgagctgcatcagtatgaccgaactccagcctgagcaagagtgagaccctgtctaaaataaacaaataaaaattaaggctgagtgcagtggctcacgcttgtaatcccagctactcagaaggctgaggcaggagaatcgcttgaacccgggaggcggaggttgcagcgagccgagatcgtgccactgcaccccagcctgggtgacagaatgagactctgtctcaaaaaaaaaaaaaaaaaaacttaatttactaaaactggtggcaggcctatgggtctgtaattcgccaacccctgtttaagctgccgaaagaagagaatgtaaagaaagaacatagaaatttatttctcagtcataacagccctgggctgacagtctaggacttcgggcagctctgctccttggaaccattcagggactcagcctccttccttctggagcacggcttcctgcgctgtggccacagctggctcagagcaccttcagggtccggctgtgggaaggcaaaaagtgtgtggaggaccacgcagcctcagatgcggcccacctcagttcttctctcatgccagaggccacagcatagtcacaaggccccatctggtggcgaaggaaactgtgagatgcatcctccagctggtccgtgcctggctgtgctgccaactagaacgaagggaggccgggcaccgtggctcaaagtgctgtaatcccagcactttgggaggccgaggcaggcggatcatctgaggtcaggagttcgagaccagcctggccaacatggagaaaccctgtctctactaaaaatacaaaaattagctggacatggcggtgcctgcctgtaatcccagttactcgggaggctgaggcaggagaatcacttgaacctgggaggcagaggttgcagtgagctgagattgtgccattgccctccagcctgggcaacagagtgagactctatctcaaaaaaaaaaaaaaaaaaaaggaggaaggagttttggtggatgaccagcattttccaccacagctgactcatccaaggtggcctcagccactctggtttgttcattgaagaaggtggtaaaagtaggggctcataaaccaataacacagacacacagaaacgattgttctcggccgggcgcggtggctcacacctgtaatcccagcactttgggaggccaaggcgggtggatcacgaggtcaggagatcgagatcatcctatctaacacggtgaaaccccatctctgctaaaaatacaaaaaattagccgggcgtggtggcgggcgcctgtagtcccagctactcaggaggctgagacaggagaatggcgtgaacccaggaggtggagcttgcagtgagccgagattgtgccactgcactccagcctgggcgacagagcgagactctgtctcaaaaaaaaaaaaaaaaaaaaaaaaagaaacgattgttctttcttccttttttgtttgtttgtttgacacagggtcttactctgttgcccaggctggagtgcagtaatgcagtcccagctcactgcagcctgaacctcctaggctcaagcaatcctcccacctcagtctcctgagcagctgggaccacaggcacgcaccaccacgcctggctaatttttcttttctttctttctttttttttttttagacagtttcactcttgttgcccaggctggagtgcagtggtgtgatcttggctcactgcaaccttcgccccccgggttcaagcgattctactgcctcagcctcccaagtagctgggattacaggcgcctgccaccatgcccggctaatttttgtatttttagtagagatggcgtttcaccatgttggccaggctgatctagaactcctgacctcaggtgattcacctgactcggccgcccaaagtgctgggattacaggcgtgagccactgtgcctggcccctaatttttcaaattctttttgcagagatgcggtcttgctgtgttgcccaggctggtctcacgcacctggcctcaagcagttctcccgccaaggcacagggattacagacatcagccaccatgtctggccccaagacatttttctaaaagacattttctttgaagctgtgtcctctgattagagttctcacactgtggttctcacataaaccactcccagaattcattgtctacaacttcctctcttcttttcttttttttttgaatgaatcaacagagtaaaggtactttgaaagcagtccaaccttttttgatttactccctcagtcttgtgcctctacctgatttgatagcaggtgttttatttggttttaacgtgattcaccttcatcaagacttttcaaaccttcaccctaacttttataggaaggaatatctccacacttgcgttttcttggtttattttatttttattttagagatgaggtcttgctctgtcacccaggctggagtgcagtgacgcgatcacagctcgctgcagcctccaactcctgggctcaaatgatcctcccacctcagcctctcaagtagctgggacccacaagtgtgtagtgtgtgccaccacagccagctaatttttaattttcttttctttttttttttttagaggcgagtctgtatgttgtctaggctggtctcaaactcctatcctcaagcagtcctcccgccttggcctcccaatccttagtttagtttaatgatgatgagtaccacctgtagaaacaggtttgggaactaacctaggtaacttttttttttttgagacggtcttgttctttcgcccaggctggagtgcagtggcacggtctcggctcactgcaacctccggctcccagcctgtagcaattgtcctgccttagcctcctgagtagctgggattacaggcgtgtgctaccacacctggctaggttttgtattttctttttattaataaagagacggggtttcaccatgttgaccaggctggtctcgaactcttgacctcaagtggtccacccgcctcggcctcccaaagtgttgggattacaggtgtgtgcctctgtgcctggccatctgtgccttttgacttcttttcctcattttgacatcagcccagagctacgacatttttttttttttttttcgagacggcgtctcgccctgtcacccaggctggagtgcagtggcacgatctcggctcactgcaacctctgcctcccaggttcaagcgattctcctgcctcagtctcccgagtagctgggattacaggcgtgtgccaccaagcctggctaatttcttgtatttatagtagagacgggctttcaccgtgttagccaggatggtctctatctgacctcgtgatccacctgccttggcctcccaaagtgccgggattagaagcatgagccactgcgcccggcccagagccacaactttaaggaggcctctccaccaccttagcagtggccgcccctcacaccgtcagcttggcactcaaggtctctgcccattctccatcccacctagcctgccctggcacttcctgaatcacactgtggcttctcatcacgcctttacccatgccattccccttacctgggatgccccctttgccaagcactcgcttggtgaactcctactcgcccttcaatacccaatgcaagacgcccttcctctgagaagctcatcctcacaattcaagctcacgcaccctggcttctctctcacccagatggatgttatcctgggtattggtctccttgtccctctccctccccacacggtgagctccgtgagggcagagcacccattgggacttccttaacccagtggttaccacttcctctatttaaacataaaacagattgaagaggctagatgcagtggctcacgcctgtcatcccagctctttgggacgctgagacgggaggatcgcttgagccaggagtttgagaccagcctgggcaacatagcgagatcccgtctctacaaaaattaaaaatgttagcctgccatggtggcgtgcacctgcaggaggctgaggcaggagaatcgcttgagcccaggagttcgaggctgcagtgagctatgattgcaccactgcactccagcctgggcaatagagtgagaccttccccccaaaaaaatttttttaataatatagattaaagggtcccttctgttgcagttaaggagctggaggccttttctacctgcccctaactctttctcaaggcggcttcctccattttcactcgttctctcaagtacattgagcacctccttgtgccaggaactgtttgtggcaccgcagagccagcagtggggaagacaggagctcacggcagagttggggagagagttataacagccagcagagggcactgtgagcgtggacatgcagcctgcatgtgagcttgaaccatgatgggcttctcagaggaggggtgtcttgtgttgggtattgaagggtgagtaggagttcaccaagcgagtgcatggaaaagggggcatccctggtgaagggaatagcatgggtaaaggcgtggagatgagaagccatggtgtgactcaggaagtgccagaccaggctatgtgggatggagaatgggcagaggccttgagtgccaagcctagggcagtggggagccatagaggagtttagagcagaggaggaatgtggtcagtgcagcagtggaagagtgggcatggggcagtgagcaggggttgtggcgaggggccagactgggccctggatccgggccagacccccacatgtgtccccatcacctgcaggccccaaagcccaagaggaaggtggaggtctgggagcagagcgttggcagcctgggcagccggcccccgctgtcgaggctggtcgtggtgaagaaggcaaaggccgacccggactgcagcaacgggcagcctcaggcggcccccaccccaggtaaggtcacagagttcccagagccgggcgcggtttctatagtggcctgtaggtggcagcagctccctttgcagttacagagacttcatggggtgggtgggggcggcctgcgacccccacaggaccaattagtggagtgagcagagaaggcaggcggcttctttttttcttttttcttttttctttttttttttttgagacagagtcttgctctgttgcccaggctggagtgcagtggtgccatctcggctcaccgcaacctccgcctccctggtttgagcagttctctgcctcagcctcccaagtagctgggactacagcaccacgcccggctaaatttttgtattattagtagaggtgggatttctccatgttggtcaggctggtctggaactcccgacctcaggtgatccactcacctcggcctcccaaaatgctgggattacaggcatgagccaccgcgcccggcctgtttttgtcttttagttgccttagtatgatgtttcctaaggcgattaagtccacagtgactggactgtgaactttgcgccatttccattcttggcagcgcacgttgcctgcctgggcaaggtttgcattggccattgttcagaagcggagctgttgagtcccgggtgtgcagatgtaaatctgcaatgggtcccatcaggtgccatccagaaaggccaggccattcacatgctgtcacctctggaccttgcaaacctgcagaggtggccggccccgtgccttgtccctggcctgtctgctgtggagctgagatgagctaactctcgctctcccaccaggagccccgcagaacaggaaggaggccaaccctacacccctgacgcctggcgcgtcctccctgagccaactgggtgcatacctggacagtgacgacagcaacggcagcaactgagccctcccaggaccccctcacggggtcaaagtcacacgtccagcttcagccacattgaggccagcattgctggtggtcagggcaggaggccttggcgtgactggaggccggacagacaagcgccagcgtgctccaacacatagggccaccaggggcctcagccccaggaggtcccttctctgtgccctcaccagcctctcaacacctcggggacccctgctgctcctgcccccacctgtcactgtgcttagggctgcaacatccctggagcagcttccaacactacttcagggtggcagtgtttggggcactgggcgagcctgccggcctctagatggcctcatctcttccttccacaaactgtctagaaccaataaaaggaaacctgccaaccgcctgggccccttctctctcccagagtctgatgaggaggtcccaggacctcctctgttagcacaattcgagggtcattccacagaggtttgtttgtgtcttgagacaggatctcactctgttgcccaggctggagtgcggtagcgtattcttgactcactgcagccttgaacttccgagctcaggtgatcctcccacctcagcctcgcgagtcgctgagacctcaggtggatgccaccattcctggctaactttttgtatatttagtagagactgggtttcatcatgttgcccaggctgatcttgaactcatgggctcaagtgatcctcctgcctcagcctcacaaagtgctggggtcacaggcataagccactgtaacaggcatgagcccagatatttatatttagttgtcgcctgagtgtgcatctgggctctttttgttttctcttctttttttttttctttctttaccttttttttttttttttttttttggagacgacgtctcgctcttgtcccccaggctggagtgcgatggcgcgatcttggctcactgcaacctccgcctcccgggttcaagcgattctcctgcctcagcctccagagtagctgggattacaggcgcccgccaccacgcctggcttaatttttgtatttttagtagagacagggtttcaccatgttggccaggctggtcttgaactcctgacctcaggtgatctgcctgcctcagcctcccaaagtgctaagattacaggcctgagccattgtgccctgcctgtacaatctttttgtttgtttgtttgagacagagtctccctctgttgcccaggctagagtgcagtggtgtgatcttggctcactgcaacctccacctcccaggttcaagcaattctctgcctcagcctccccagcagctgggattacaggtgcctgccaccacgcccagctaatttttgtgtttttagtagagacgggtctcaccatcttggccaggctggtcttgaactcctgacctcaggtgatctgactgcctcagcctcccaaagtgcagggattacaggcgtgagacactgcaccagcctggaatcttttaaagtgaacaatatgaaccttctttgagtaggcagttccatttctggctgtctgttctaagaggtatttgcccacattcataaggaaacacccacgaggaggtttgtcgtgacactgtgtttagcagcaacattatggggaacgaacccaatgtccccagtaggtgaaggctgaactctggcataaataatggaattccagccgggtgtggtggctcaggcctggaatcccagctacttgggaggctgaggtgggaggatcacttgagcccgggagattgaggctgcagtgaggtgtaactgtaccactgcactccagccttggtgagagaccaagatcctgcctgaaaaagggggaggggggtggggagctaggcccaggacaggaactgtggcatgttcctgtaatcccaggactttggggggctgaggcaggagggttggttgaagacaggaggtcgagtccagactgggcaacatggccagaccgtttctcaatttgtctttttttaaagaaaggtggggcacggtggctcacgcatgtaatcccagcactttgggaggccacggcgggcagatcacctgaggtcaggagttcaagaccagcctggccaacatggtgagactcccaccacccccactaaaaataaaaaaattagtcagatgtggtggcgggcacctgtaatcccagctaattggtaggctgaggcaggaggatcacttgaacctggaaggtggaggttgcagtgagctgagatcatgccactgcactccagcctgggcaacagagtgagattccatctcaaaaaataattaattaaaaaaaaagatgctacaatttgccttcaaaggggctgcgctctacatactcaacaaggatgggactcactggctttatgagtagaaagctctggctgggaagttcccctcctcggcgggggcagcagaaggagttggcagagggaaggaaggaacctgtgtttatcaaatgttccctgagcatttggcagaaacaaagttgaactcccacttccaacacccgttcttattttaattttaattttttttttttttgagacagcatctcactctatcacccccgctggagtgcagtggcaggatctcggctcactgcaacctccgcctcccgggttcaagcgattctcctgcctcagcctccagagtagctgggatgacaggcacgcgccaccctgcctggcttaatttttgtatttttagtagagatggggttttgccatgttgccaggctggtctcgaactcctgacctcaagtgattcgcccgcctcagctcccaaactgctgggattacaggcgtgagctaccgcacccggcccccaaaaaacttttatgtattatatatttttacaataacatataaataatgtataccgaaggtggtgaaaataaagcaggtgagtgtgttctaaggagatgcagaggggatgccttgggaacgtgtttattgcccatctctccctctgtttgttttctggtgctgcataacaaattataccaaaactgaacaacttaaaaacaacatagagctgggtgtggtttcattgggtctcccgctttaaggtttagcaagaatgcaatcaagacagaggccaggctgggcgcagtggctcatggctgtaatcccaccactttcacaggccgaggcgggcggatcacttgaggtcatgagttcaagaccagcctggccaacatggcaaaaccctgtcactacaaaaaagtacaaaaattagttgggcatggtggtacatgcctgtaattccagctacttgggaggctgagacaggagaatcacttgaacccaggaggcagaggttgcagtgagccaagattgcaccactgcactccagccagggggacagagcgagactcccgtctcaaagaaaaaaaaaaaaaaaagacacaggcccaggctggggtgtcatctgaaggctcaactggggaaggacctgctgccaaacctttgtggttgttgacagaattcagtccctcatggctgttggccagaaaacactctcagtttcttacctacacagaccttgtctgcagcttgtgtctttgtccatttgctgctgctttcacagaacaccacagactgggtaaattataaacagtagaagtttattcgggccgggcgcagcggttcacacctgtaatcccagcactttcagaggctgaggtaggtgtatcacctgaggtcaggagtttgagaccagcctgcccaacatggtgaaactctgtctctactaaaaatacaaaaattagccgggcatggggcaggtgcctgtaatcccagctactccagaggccgaggcaggagaataacttgaacccgggaggcagaggttgcagtgagccaagattatgccattgcactccatccagcttggacaacagagtgagactccatctcaaaaaaattggtgcaccccagcaccccaaaaccagctggcacatcgtgggtgctcgcaaatgggttgagggggcatcaccccattccccaatgaggaaacaggctcagggagccccaggtttcacctcctcccctctcacaccccactctttcatacaccactggaattttatttttatttcttttttttttcccctgagaagctttgttctctcaccctgtgtcctgggggcaattctgctctcagcccccagttctctcctgggggttcccaggactgagggagtagaggggcaggcacagccatgcatcgggctctgtccctcctgaccagcgggggacccctccctgccctgccccacctctcagggccccctaccctcaccctctgaagcctgcccttcccctatccctgccgacagtacccgttccccaccagcccgcgtctgtcatcctgtcttcgggagctgtcagccttcatctgagatctccatcaactcctccggggctgcctggctgctggagcacatcagagggatggggaggaggggcgatgggggccccttctgctggagcccactgccgccccagcctgggcttacaggagaagaggggccatgccatttccccagcttttgccagttccagtgtgaacttggggctccctgagcctgtttccttatctgggaatggggtgacaccacccactcagtccacaaacaccccccgggcacacgctctgttgctgccccatttacaggtaagggagactcctcgacctccagggtgagggagggacagggcctgggtatgaagctccaggctccgaggctacgcctttggtcacccaccccactgcaaccccaagagctgggctgtgcctgcgtgtcagactggagccctggaagggctggatcatgcctcccccatcaggtaggggcccctagaaggaaggctcgcttctcctccagcagactgggaccttgtaagttagttagggccatgcctcctgtgttggactgggcccttgaaatttacaccatacctcccccatcagactggggacgcttgaagtttggactatgcctccctcatcagactggggactcttgaaggcaggcctatgtctcctccattactctgggaccctggaagtcaagactatgtctcctgcattagacaggggaccgttgaaggttgaacctgcctcccccatcagactgaagataggttcacgtctccttcctcagagtgggaacccctcaaggtagggccatatctctcccatcaaatggaagctcctgaagtcagagccgcaactcttccatcagactgggggcttctgtggacaaggccatgcctctgccatcagaccgtgagttaagaaaggcagagctggccaggtgcagtggctcacgcctgtaatcccagcactttgggaggccgaggcgggcggatcacgagatcaggagatcgagaccatcctggctaacacaatgaagccaagattgcgccactgcactccagcttggacgacagagcgaaactctgtctcaaaaaaaaaaaaaaaaaaaagacagagctggctaggcacagtggctcatgcctgtaatcccagcactttgggaggccaaggcgggcggatcacaaggtcaggagttcaacaccagcctggccaacatggtgaaaccccgtctctactaaaagtacaaaacttagccaggcatggtggcatgcacctgtaatcccagctactccagagactgaggcaggagaatcgcttgaaacaggaagcgggaggttgcagtgagccaaggtcatgccactgcactccagcctgggcaacaagagtgaaactccatctcaaaaaaaaaaaaggcagagctggccaggcgcagtggctcacgcctgtcatcccagcactttgggaggccaaggctggcatatcaccggaggtcaggagttcaagaccagcctggccaatgtggtgaaatcctgtctctactaaaaataaaaaattagctaagtgcagtggcacacacctgtagtcccagctacttgggaggctaaggcaggagaatcgcttgaacccaggaggcggaagttgcagtgggccaagattgtgccactgcactctagcctaggcaacagagtgagactctgtctcaaaaaaaaaaaataaagatggctgggtgcagtggctctcacctgtaatcccaaagctttgggagaccgaggcaggaggatcacttgaggccaggaattcaagaccagcctgggcaacattgcaagatcccaattctagaaaaaaagatttttttttttccaagatggagtctcactctattgcccacgctggagtgcagtggcacgatctcggctcactgcaacctctgcctctcaggttcaagcgattctcctatctctgcctcctgagtaggtgggattacaatgtgcctgccaccaagcctggctaatttttgtatttttagtagagacggggtttcaccatgttgggcaggatggtctcgaactcctgacctcaggtgatccacccgactcagcctctgcaagtggcgggattacaggtgtgagccaccacacccagccctctagaagaattttaaaaattaaaaaacacaggcctggccaggtgcggtggctcacgcctgtaatcccagcactttggaaggccgaggcgggtggatcatgaggtcaagagatcgagaccatcctggccaacatggtgaaaccctgtctccactaaaaatacaaaaatcagctgggcgtggtggcacatgcctgtagtcccagttactcgggaggctgaggcaggagaatcacttgaactcgggaggcgggggttgcagtgagctgagatcgtgccattgcactccagcctggtgacagagcaagctccgtctcaaaaaaacaaacaaacaaacaacaacaacaacaaaaaacacaggccccagaatggacgcagcttgaggacatcacgctcagtgagaaacaccagacacagaaggccacaaagtgtgtgatcccatttctatgaaatgtccaggacaggcccatccacagaggcaggaagtggatttgtgtttaccaggagctggggatttggagagatggggagtgacagctaattgggtatgaggtttcttttggaggtgacgaaaatgttcaggaattaggggtgatggtcgcacaaccttgtggacacaggagaaaccactgaattgtacactctaaatgggtgaactgtaggatatgtaagttatgttttttgtttttttgagatggagtctcgctctgttgcccaggctggagtgcagtggctcaatcttggctcactgcaacctctgcctcccgagttcaggtgattctcctgcctcagcctcccgagtagctgggattacaggtgcccgccaccacgcctggctaatttttgtatttttagtagagacggggttttaccatgttggccaggctggtctcgagctcctgacctcaggtcatctgcccacctcagcctcccaaagtgctgggattataggtgtgagtcactgcacccagccaatgtgaattgtatctttaaaaaaaaaaaaagcaacaaggccgtgtatggcagctcactcctgtaatctcagcactttgggggcgccaaggtgggcggatcacgaggtcaggagtttgagagcaccctggccaacatggtggaacaccatctctactaaaaatataaaaattagctgggtgtggtggcgggcgtctgtaatcccagttacttgggaggctgcggcaggagaatcgcttgaacctgggaggcggagcttgcggtgagccgaaattgtgccactgcactttagcctgggcgacagagcaagactcggcctcaaaaaaaaaaagcggccggactcggtggctcacgcctgtaatcccagcactttgggaggctgaggcgggaggatcacaaggtcaggagatcgagaccatcctggctaacagtgaaaccccatctctactaaaaatacaaaaaagtagccgggcatggtggcgggtgcctgtagtcccagctactcgggaggctgaggcaggagaatggtgtgaacccgggaggcggagcttgcagtgagccgagatcgcaccactgcactccaggcccgggcaacaaagtgagactctgcgtaagaaaaaaaaaaaagcaaaaaaaaagccgggttttgtggtatgcacctgtggtcctagctaccaggaggctgagatgggaggatcatttgagcccaggatgttgaatgtgaggctgcagtgagctgtgattgcatctccagcctgggcaacagagcgagagaccctgtctcaaaaaaaaaaaaaaaagggagaaaagaaaaatccaaatctcacaaggttacgtggctgattcaaggtcacaggggaaggtgactggacccctagcctggatctctttctcttctacctaatcctcctgcctctccctgccagcctctccccactcccctccttggggtagggtcggggtgcagccccaggagaagccagctccaaagcacaggaaagtcaaatgccgtttgattccggccccggggcctctaattgctattcctgacacagattgtaattagaaggcccctttcaaatatttatacctcagacatctagttttatccggcagggagacgacttggatttgatgagatctgtcaacagctcatccccgtggcccggaattgccttgcggctgacagaaagcaggacaattacccgctgtgctccctggccgcccccagggacgcagccttgtcgctgatctgaaagggtggggggaagcgggggtggccatgcacttcaggagggaggaaggagttcaacaggtctgtgttgggggacacagccagtgcagggaaggggaggaacagaagggtctagacgcctgcatccttcaggggctttgccttgttggctccaggcctcagttttcccatctggataatggagctcatcgtggagaggagttgcagaaccgattccatgaagagcattttgggaggccgaggccggcagatcacctgaggtcaggagttccagaccagcctggccaatgtggtgaaaccccatctctactaaaaatataaaattatataaaaattagctgggcgtggtggcagtaatcccagctactcaggaggctgaggcaggagaattggttggacctgggaggtggaggtttcagtgagctgagatcgcaacacggcactccagcctggaggacagagcaaggctccgtctcaaaaaaataaaaagagagactccagtgccaccctaggccaggccccacggcgatgtgcaggcagaatcagctgtggagtggctctgaacaagtccctcccatctctgtgcctcggtttccccatccataaaatgaggaagccaggtgatagctcggtccctcctggaatccttcctagagctgtctgggatttcctgttagaaaccacatctttcaaataaggaaaaccaagactcagggagtgacagaccctgccctcagccccgccgggctgccaggaggccccagtcatagcagtgttggttctgacttctgtcttgtcctccaactgtgctctccaagctatgacctgtgcctgaccagggggctggccacaagaggagagaatctggggtcccatccttcctgaccacccctctctcactcccctcattaggaggaactgggcaagcccccttatggggaaagaaaaaaaacggttctgcactggaaaattggccagtggctcccttttcctctcccaccccccaaacctctcagtgccctcaccctcagacaacgacagctgacaacaggcagccagttcaggccagacccctctcacttctgcccctcttcccgccaccgctcccccccaccccgcccccagaagccacaaaaggacagatgcagaggacaggcgccaggcacagataccatctcccttccccaagccagctgcccccaaccctccccctgcccgcaattagtcctctggggcgggagcggggcacagagcagagccctcttgggggaggggaagcccgatccgcacccacccttcctttgcccccctcttccttctgctgctccaatatcaatttcagccagtgacctctccaccaatttgcacatccccactctcccggtccgtttcaccgccagacatcggttccatttcgaccctcactggcggtcattcccaccccctctgctggtcaatttcaccccttttggcggtcaagtgcagtcccccatttcccgggcaatttccccctcccctccttctccctctcccctcccctccccagcagtgtcactcccagctgctccccacctcccgcgctccgcgctcgctgcggccagtctcgggcgtcccggtcagtgtccagctgccgcggcctcggccccggcgactcccgcccccagccccccttccctccgcgggcagcggctccctccctccccagaacagctgaaggtctcagtcacctccgaggggagcgcagggggaggggaggggcgggggacgcggcggaggggaggtgggggagccttgacgctgctgcccgggacgcggcccggggctggtgggaacaggggcgtcctcctgcgcgcccccctccccagcgtcccacctcccggcggcggcggggaaagtctctccgaaagcgtgaagggggattggaggaggtttttatttccctttgtgcgggtggctggggccggatcgaggcggcgggggccgcgggactgggggctccccgctgagccgagaggagcgcgacaaaggatgcgtcccgccggggtcacagtctccgcggcccaactttgcgcgcggcgcccgcgcccctggggagcccgcccgctgcgctgagaacccaggcgtccgggctgggagaggggccgggagcgtccgcaggtggcgctggcccggatctcccgaccccaggaagggatcccggagcttcctggaggcggcgggcggccgtgtcgctccagggaaccgcgctgcccgcggaaactccgcgcgcctccgcggatgcccctcgccctagcccccagcgcgcggggttcggggccctgcgaggtccccccttcccccgcggtgcttcccaagctgggctaaggcgggcttctcttcctccctcctctgtcgcctccttttcctccccctcgttcaccttttccttccctctatccatccagagccccgccaaagggcgcacctgatctttctcatccttccctgctcttcccttcctctccacctcctcctcctccttggggaaaggggcccggagaagggcatgtgggggcccctctgacagtggcccgattggggtgacaggcgcccaaatggccaagtggctacgggactacctgagctttgggggtcggaggccccctccgcagccgcccaccccggactacaccgagagcgacatcctgagggcctaccgcgcgcagaagaacctggacttcgaggacccctatgaggacgcggagagccgcttggagccggaccccgcgggccctggggactccaagaaccccggagatgccaagtatggttctcccaagcaccggctcatcaaggtggaggctgcggatatggccagagccaaggcccttctgggcggccccggggaggaggtgcgtggctgggtggcctggggagactgggtggaggggaggctcaggatgggctctctggatcgtggagagcttattttatgtgtgatcacaggaggggactggggcaccagacagacccttcccagtcctccagacctccacctgcttggggaagtctgttctttttatgtatttatttattttgagacagtctccccctgtcacccaggctggagtgcagtggtgggatctcggctcattgcaacctccacctcctggggttcaagcgattctcctgcctcagcctctccagtagctgagattacaggtgtgtgccaccacacccggctaatttttgtattttcagtagagactggtttcaccatgttagccaggctggactcaaactcctgacctcaggtgatcctcccgcctctgcctcccgaagtgctgggattacaggtgtgagtcactgcgcccggtggatatctgtcccttttcaatgcataatgctggttgtccttctgcctctctgaccaccctgcttggtctccgggtcctcctcctcctccatggtcatcccctgcagtcccccagccccctcccctcagcaccccttcctcttggaacctggtgggatcttcctaaaatagatctgagtgagttgctcccctgctgggcacctaaatatcctcccggtgatgctgcccttcctaccactatgttcccgttttacagaagcgaaactgaggctcgcagaacggtagtgacttggctaaggtctcacggggttctagcttactaggatttgaacccaggccaccgggtgcagtagctcatgcctgtaattccagcactttgggaggtcgaggtgggaggattgcttgagcccaggagttcgagaccagcccgggctaacagagtgagaccttgtctctacaaaaaaaaaatcaaaacattagctagttgtggtggtgcacaccatagtcccagctactcaggaggctgaggcaggaggatcacttgagcctagaaggtcaaagctgcagtgagtcatgattgcgccactgcactccaacctgggtgacagagcaacaccctgtctcaaaaaaaaaaaaaaaaaaaaaaaaaaaggctgggtgtggtggttcacacctgtaatcccagcactttgggaggccaaggcaggtggatcacctgaggtcaggagttccagaccagcctggccaacacagtgaaaccccatctctaccaaaaatgcaaaaattaaccaggcgatgtggcgtgcgcctataatcccagctactcctgaggctgaggcaggagaattgcttgaacccaggaggtggaggttgcagtgagccaacatcgcgccactgcactccagcctgggtgacaagagcgagactctgtctcaataaataaataaataagaagtaagacgttggtaagaagagccagggactcgaggaaaccagtcagccgggatcagactcggcctcttacttaccagctgtgtgtccctaagcaaaacacttactgtctctgtgccttggcttccttgtctggaaaaggggaatggtgtacttattacatgttggtattacaaatcaacacaggtaaatccttgacaatagtgcacggagaagcactgaagtgggcgaaggagggaggcaggtgtctgtgctggggaaatgggatcaagacagagggagacgtgggaagccagccgctgtctgcgagcacttttgggtaacagactccctctccaacccccaaaaagaactcttggagaggccaggcactgtggctcatgcctgtaatcccagcactttgagaggctgaagcgggcggatcatctgaggtcaggagttgaagaccagcctggccaacatggtgaaaccctgtctctactaaaaatgcaaaaattagccaggtttggtggccggcaccagtaattccagctactccagagactgaggcaggagaattgcttgatcccgggagtcggaggttgcagtgagccgagatcacaccactgcactgtagcctgggcaacggagcaagactccatctcaaaataaataaataaataaaactcagctgggcgcggttgctcacgcctgtaatcccagcacgttgggagcccgaggcgggcagatcacgaggtcaggagatcgagaccatcccggctaacacggtgaaaccccatctctacaaaaagttagccaggcatggtggcgggcgcctgtagtcccagctactcgggaggctgaggcaggagaatgacgtgaacccaggaggcagagcttgcagtgagcccagatcccgccactgcactccagcctgggtgacagagcgagactccatctcaaaaaataaaaataaaaataaataaataaataataaaaaaataaaaactcttggagaggtgtcagatggccctgtgggcaggcaagaggtgcagcgtcaattagcagggaagcccctctgagtccttgtcttctccccttccttctctccgcagctggaagccgacactgagtatttagacccctttgatgctcagcctcatcctgcacccccggatgatgggtacatggagccctacgatgcccaatgggtcatgagtggtgagtaggcacggcttgggggaaggtgacagggtcccagatgggagcaggagctgaacagtgtccctggcctcctagaacttcccggcagaggggtgcagctctatgacaccccttatgaggaacaggacccagagacagcagatggacccccttctgggcagaagcctcggcagagccggatgccccaggaagatgaacggccagcagatgagtatgatcagccctgggagtggaagaaagaccacatctccagggcgtttgcaggtgcttctcagacccacactctgacatctgaatgccccatccctgcatttcctcatctggtcatgtctcctgtttcagtttacaaagtagagtccaattacttgtcacttttgtagtttgttaattctcactagagtgtgaatgactgatagtcctaaattctttcttccaagacaacctgcatcttccttggaaacgcaaacactttttagagtggaatggaacctacttatcctgctcagtgtggtgtggggagaggaatatggcttgcttttagaataggatgtgggggtggcaggggcagcatttctttattttattttattttattttatttttctttcgtttttcttccaggcggagtctcactctgtcgcccaggctggagtgcagtggcgtgatctcggctcactgcaagcttcgcctcctgggttcacgccattctcctgcctcagcctcccgagtagctgggactacaggcgcccgccaccacgcccggctaattttttgtatttttagtagagacggggtttcaccatgtcagccaggatggtctcgatcttctgacctcgtgatccacccgcctcggcctcccaaagtgctgggattacaggcaggagccaccgcgcccccgcccggggcagcatttcttaatagctgctagtaaactacaggtgaatttccagctgaattggatgagcttggagaagcctctgaaccttagttttctcttctgtaaaagagataatgataaaatcagttttaaaaaataaaataattgccgggcacggtggctcacgcctgtaatcccagcactttgagaggccgaggcgggtggatcgtttgaggtcaggagttcgagaccagcctgaccaacatggagaaaccccgtcttactaaaaatgcaaaattagtcgggcgtggtggtgcatgccggtaatcccagctactcaggaggctgaggtaggagaattgcttgaacctggaggcggaggttgcggtgagccaagatcgtgccattgcactccagcctgagcagcgagagcaaaactttgtctctaaataaacaaatacataaaataaaataaataaaatttggaccaggaagagttgtgcaaacacgactttgcccccaaagttttatgactgggagggtatttagagcttagtgcctttgtccacctgtctgtagattgggggtgattttctagttttaggacttggccacagtctgggctgaaccccagaaggggtttagggactagggctcctctttggaaacttcgaaccgaccccgtctagccacgccccttgtgctccttgccaccagatttataaatgaccgcacctatttcttaggaaggccaaaaggttgcacctgtggccaatcctgcccctgccttaagcccagcccctgggctgtgataggttgtcccaagctggccctgcctttctaccgagattccattggcttgcccctgccccgccccccaaggtaggctggacttaaccctttcctctctaaatctcctttccagtgcagtttgacagtccagagtgggagaggactccaggctcagccaaggagctccggagacctccgcccagaagcccccagcctgcggagcgtgtggacccagccctgcccctggagaaacagccgtgagtggggaagctgaaggtggaagagccccgttgaacgtatctgtagactccaatgtatcaggcagaagttttttcgtttcccagattagaggaactgggggaacttcgattcattcatccacttatttcttcagctaatctttacgggctccagagcctgctgcgtgccaggcacccagctagacacaaaacaatcttatggggtcccttttcctttggtatcaagttctgggttcacattcctgctctcctctcctggctgtgtagcctggggcaagtcacttaacctctctgagcctcaggttcaaacagaaaaggcaatttccttccttaacttgggtggggcttacagcctcagagccaagagacagaaatcattctcagccagttcttggttcttgggatggaaccaggagatgcaggattttggtgggctcacagctccgtgctggggtggcacgtgagccgggagacgctgactctgtgtccttccagcctgggcgctccttgagggagtgcccaagtccccagaatccagaccatgttgtcacagtcacccctaaaatctcttcggtgggcaatacagaactggctatttaactctgaggccgagggtgtgaagattgttctctttttttctttctcttcctccctccctccctccccgagtcttgctgtgtcgcccaggctggagtgcagtgacgcgacctcggctcactgcaacctccatctcacaggttcaagcgattctcatgcctcagcctccagagtaggtgggactacaggcgtgcaccaccatgcctagctaatttttgtattttcagtagagacagagtttcagtatgttggccaggctggtctggaactcctgacctcatgatccatccacctcggcctcccaaagtgctgggattacaggtgtgagccaccccgcccggcccttcctccttctcttctcttctctttcttttcttttcctttctttttttttttttttttttttgacagagcctcgctcttgtcgcccaggctggagtgcaatgacacaatctcagctcactgcaacctccgcctccctggttcaagcaattctcttgcctcagcctcccaagtagctgggaatacaggctcctggcaccacaccaggctaatttttgtatttttagtagagacagagtttcaccatgttagccaggctggtctcaaactcctgacctcaggtgatgtgcttgccttggcctcccaaagtgttgggatgacagccatgagccaccgcacctggcccgctctttctttttctttctttctttctttctttctttcttttctttctttctttctttctttctttctctctttctttctttctttctttttttctttccttccttccttccttccttccttcctaccttccttccttccttcctttctttctctctttctttctttcttttgagacagggtctcactctgttgcccaggctgaagtgcagtggcacaatcagctcactgtacccctgcactcctgggatcaagcgatcctccagcctcagcctctccatgggaccacaggcacgccatatgtgcttattctcttttcagatttctttcattgtgaacaacagcaaaggctctggtgcttctctgtctttgatatcttgcttgctactgcaaacccctttgtgagcacattaaagcaaaacattaggccaggcacggtggctcacgcctgttatcccagcactttgggaggccggggtgggcagatcatgaggtcaagagatcaagaccatcctggccaacatggtgaaactccatcattagccggacatggtggtgcgtgcctgtaatcccagctactcgggaggctgaggcaggagaatctcttgaacctgcgaggtggaggttgcagtgagctgagatcacgccactgtactccagcctggcgacagagtgagactccatctcaaaataaaacaaaaaaacattaagaaaggggctgggtaaggtggctcatggatgtaatcccagcactttgggaggctgaagcagcggataacctgaggtcaagagtttgagaccagccaggccaacatggtgaaaccccatctctactaaaaatagaaaaaaattagccaggcagccgggcgcagtggctcatgcctgtaatcccagcactttgggaggccgaggtgggcggatcacaaggttagagattgagaccagcctgactaacatggtgaaacccagtctttacgaaaaatgcaaaaaattagctgggcgtggtggcgggtgcctgtagtcccagctacttgggaggctgaggcaggagaatggcgtgaaccggggaggcggagcttacagtgagccgagatcgtgccactgcactccagcctgggtgacagagcgagactctgtctcaaaaaaaaagaaagaaaaagaaaaaaacagaaagggacaggtgggtgaggtacaagatgaagcaccacttttgtgaaagtggttgaagttgacaaggacatgagggaggctgtgaagatcaatgtcaagtgtacgataaccagggctcctcttgaaaaatccaagggtattggccgggcatggtggctcaagcctgtaatcccagtactttgggaggccaaggagggcagataacctgaggttaggagttcgagaccagcctggccaacatggtgaaaccccatctctactaaaaatgcaaaaattagccatgtgtggtgctatgcgcctgtagttccagctactctggaggctgaggcaggagaatcgcttgaacccaggaggcggaggttgtggtgagccaagattgcaccactgcactccaacctggcaacagagcaagactctgtctcaaaaaaaaagaaaaaagaaaactccaagggaattgtccttcttcatttgcccagatgccacaagcccatgcaccagctgtgacccaacagatcccagagtgtgtttttttgtttgtttgtttgtttgttcgtttgttttgagacagagtctcactctgttgcccaggctggagtgcagtggtgcaatctcagctcacaacttccacctccctggttcaagcaatttccctacctcagcctcctgagtagctgggattacaggcacccgccaccacgcccggctaattttttttgtatttttagtagaaacggggtttcaccatgttagggagactggtttcgaactcctgacctcaggcaatccgcccgcgtcagcctcccaaagtgctgggattacagggccccagagtgtgtttgaagggaatggcccttgatgagacatctgtccatactcgctaggtggtttcatggccccctgaacagggcggatgcagagagcctcctgtccctctgcaaggaaggcagctacctagtgcggctcagtgagaccaacccccaggactgctccttgtctctcaggtgagaactcagcctcacagggacgaagggtcacaggattgcgtgagtcacccttttgggttaattcagagggaaggggagggtgtggctcccgcagccatagggaagggcttccaggtcagtgggtgggacttctaggagaaggggtgggagttctggggaggccattagctggttgcaattgagaatgagctcaccatcgctggaggtatacaagaagatggagtggaaggcatcgaggaggtccaggccttgggtaagacaaggaactaggtgcacaagattcctctggactccccttgtccaaaaatggaggtatatcaatttgtgtccatctgaagccaaaatttcagggtgtacctgtaagcgttttaggttgagaccctgtttgtacgcacttccgtccctaaaattctaagtctgtctaattataaaccactcctaagattctgctaggtgtctgagtggaagatctaaaagcacgagattggggctgagcgcggcagctgacgtctgtaatcccagcactttggaaggctgaggaaggtggatcacttgaggtcaggagttcgagaccagcctggccaacatggtgaaaccccttctctcctaaaaatacaaatattagttgggcatagtggtgcatacctgtaattccagctacctcggaggctgaggcaggagaattgcttgaacctgggagacggaagactttcggcgcataccaccgtgcccagctaatttttttttttttttttttttttttgagacggagtctagctctgtcacccaggctggagtgcagtggcgcgatctcggctcactgcaagctctgcctcccgggttcacgccattctcctgcctcagcctcccgagtagctgggactacaggcgcccaccaccacgcccggctaatttttttgtatttttagtagagacggggtttcactgtgttagccaggatggtctcgatctcctgacctcgtgatccgcccgcctcagcctcccaaagtgctgggattacaggtgtgagccgccatgcccggctaatttttgtattcttagtacagacagggtttcgccatgttggccaggctggtctcaaactcctggcctcaagcaatccgcctgactcggcctcccaaagtgctgggattgcaggtgtgggtcactgcacctggcctcttattattattattatttatttatttatttatttattttttgagacagagtctcgctctgtcgcctaggctggagtatagtggcacgatctcggctcactgcaagctccgcctcccgggttcacgccattctcctgcctcagcctcccgagtagctgggactacaggcgcccaccaccacacccagctaattttttgtattttttagtagacacggggtttcaccgtgttagccaggatggtctccatctcctgacctcgtgatccgcctgccttggcctcccaaagtgctgtgattacaggcgtgagccaccgcgcccagcctatttttttattattattattttgagacagagtctcactctgtcacccaggctggggtgcagtggcacaatatcagctcactgcagcctctgcctcccaggttcaagggattctcatgcctcagcctcttgagtagctgggaccacaggcacccgccaccacgcccggctaatttttgtatttttagtggagatggggtttcaccatgttggccaggctggtctcaaactcgtaacctcaagtgatctgcctgactcggcctcccaaagtgctgggattacaggcgtgagccaccgcacccgcctaatttttaaatgttttttggtggagacggggtctcactctgttggccaggctggtctctaacgcctggcctggagtaagcctacagcctcagcttcccatatcactgggattacaggtgtgagcgagtataccagccaccacactgctgtttaccagagactggagacacacgagcacctggcctgggcactgtgggaggtggctttggggatggtgcctttctgggtgggtccgggatgctcaggagtccctttctccctcatcgcccaggagcagccagggcttcctgcatctgaagttcgcgcggacccgtgagaaccaggtggtgctgggccaacacagcgggcccttccccagcgtgcccgagctcgtcctccactacagttcacgcccactgccggtgcagggtgccgagcatctggctctgctgtaccccgtggtcacgcagaccccctgacagtgaccctcggcccccttttgagtcctcgggcccagaatcgtatcccaaagccctcccatggcctagaaaataaataagttattgtttgtcttagtgtcctttctgggctacagagggaagtgggatcgttgactcccagcgggaaagccctaagcagccctggagagggggataatggggtaattgaaaccctggaggaggccaggcacggtggctcacgcctgtaatcccagcactttgggaggttgaggcaggcagatcacctgaggttgggagttcgagaccatcctgaccaacacggagaaaccgcgtctctactaaaaatacaaaattaaccgggcgtggtggcgcatgcgtctaatcccagatactcgggaggctgaggcaggagaatcgtttgaacccaggaggcggagattgcagtgggctgagatcgcaccattacactccagtctggggaacaagagtgaaacgcctccatctcagaacaaacaaacataaaaaaccctcgaggccttgagggccaagcacatccccagcactttgttttggggacagagttgggattggaacctgaatctcccatagggagggaccagaactcagcaagagacagagcgtcgtggagcagattaaaaaccgcactccatagaaaccgacagatacaaagatggagaaactgaggggggccaggctctcgggccagccccgctccctccccccggcagcagtggcttgatctgcagaaaggacatctgtccccatggaaacagcagaagtaggggaggggagctgggcctagctggtgtcacttcaaggtgacaggccaggcaggcaggagacctggggggctggtaaacaccatgaatctcctgacctccccttcttctccccacctccaggcctgcctgggagtgatgccagctgcggggggggtcttccatggcaggggactgtttggaagccagagtaccacttcttcctccttggatttgtccctataaggtgggaggggggctttgagttgccacaaagtcccttggccacagtgggcctctccagccacccctgagagctctgggaccccagatgaccccttaagtctttttggtgcgtgtatgtgacagggtctcactctaccacctaggctggagggcagtgacataattagagctcactgcaacctcaacctccagggctgaagtggtcctcccctctcagcctcccaaatatctgagaccagagacatcagctgcaccatcacgcccggctaaattttgtatttttcgtagagacggagtttcaccatgttggccaggctggtctcgaactcctgacctcaggtgatccgcccacctcggcctcccaaagtgttgggattacaggcgcaagccaccgcgtctggccttgtttttaaattttctgtagaaatggagtcttcttgctctattgcccaggctggtctcaaactcttggcttcaagtgatccttccaccgcagcctcccaaagtgctgggattagaggcgtgagccaccgcacccgatttcttcagatctttttagcactcccaaatcgccacaaacaccagctttgctttttcttcacaagcctttattaggttcttgggggaaagtgggagcgagatccatcattacagaaatgaggacggggtctcaggatggggctgacaggctcccaatcctcctgctttttgttttttttgagacggagtctcactctgtcgcccaggctggagtgcagtggcgcaatctcggctcactgcaacctccgcctcccaggttcaagccaggctggtctcaaacccctgacctcaagtgttccacccgcctcggcttcccaaactgctgggattacaggcgtgagccaccgtgtctggcctcgatccccccttttttgtgtgtacctatgggtggggtcctgttgaggtctcctgggatctctcactcctctcccactttggggaacccttttggcctcggctgctgggtggggcttggtctaggagagaccctgaccatagagacggggtggccgggcctggggctggggcagggtctcgggctggggcagggtcttgacgccaggtgcggctggcggggggccggttgcgggaaggaggttgaataaatgctctggcccctctggtccttcccctctccagagcagtcctcactcttctttggggccccccggggccggtataggacgttgctgtagaatgcatttcctaggatggatgacacagaccaagaggatcacttaagagagtcctgccctctccagctgacctctgggggatctgtctctttttttttttttctgtgagacggagtctcactctgtcgcccaggctggagtgcagtggcgcaatctcggctcactgcaagcttcgcctcctgggttcacgccattctcctgcctcagcctcccaactagctgggactacaggctcccgccaccatgcctggctgattttttgtatttttagtagagacggggtttcactgttagccaggatggtcttgatctcctgacctcgtgatccacccgcctcggcctcccaaagtgctgggattacaggcgtgagccaccgcgcccggcctttttttttttttttttgagacagtcttactctgtcacctgggctggagtgtagcagcggtgcgatctcagctcactgcagtctccacctcccaggttcaagtgattctcctgcctcagtctccctagtagctgggattacaagcccccgctactacgtctggctaattttttgtatttttagcagagatggggtttcaccacgttggccaggctggtctcgaactcctggcctcgtgattcgcccgccgtggcctcccaaaatgctgggattacatgcatgagccactgcacccggccaatttttttttttttttaatttcaaactgtctttttgtttgtttgtttgttttttgagacagggtctctctctgtcacccaggctggagtacagtggggaaactatagctcactgcagcctccgcctcccaggttcaagcaatcctcacacctcagcctcccaagtagctgggaccacaggcgtgtgccaccaagccaggctaatttttttgttgttgttgagatggagtctggctgtgtcgcccaggctggagtgtagtgaggcagtctgggctcactgcaatctctgcctcctgggttccagtgattctcctgcctcaacctcccaagcagctgggactacaggcacaggccaccacgcctgggtaatgtttgtatttttagtagagactgggtttcaccatgtcgcccaggctggtctcaaactcctgacctcaagtgatccacccgcctcagcctcccaaagtgctgggatgacaggcatgagacaccatgcacagcctaatttttaaatttttttttttttgagaccgcgtcttgctctgtcacccaggctagagttcagtggcgcgatcttggctcactgcaacctctgcctcccgggttcaagcgatcctcctgcctcagcctcccaagtagctggtattacaggcgtctgccaccacacctagctaattttttgtatttttagtagatacaaggtttcaccatattgtccaggctgacctcaggtgattcgcccacctcggcctcccaaaatgctgggatgacaggcatgagccaccgcgcccagcaatttgtaatttttttgtagagatgggatcttgctaggttgcacaggctaggggctttgtctctatttctgaaaaacatgagcataggatataggagccaggcttctcctcccttcatccctcctccatccttcccccaggcgggagcacagatgcagtgggtctttgtcaagcagctgcagttcccacctcctccgccctaccctcccttacctgggctgttacctgagtccctttgctggcagctgcggcggccccagaaccaggcaccccacacgatcgcagccacacccatgcttcccacccccagcagcacgaagaggaatcctgggtagggggagaagagatggtctaatcaggaggggaaggggtggtgatgcgggtggaagacgctgggggaggaacacagggcagggctcacctgggaagcttgcgatccggtttctgttctgtgtggggtcatctgcagagaagaaatctatgtcacgggggtgccaggcttctccaccctccaaggacagagctcacttggggggacctaagtgttcctcctcctgccaggctttgtggatttgggcaagtgttcactctgaacctctgtttcttcttctgaaaaatgaggctcagcaggacgcggtggctcaggcctgtaatccgagcactctgggaggctgaggcaggaggatcactcgaggtcaggagttcgagaccagcctggccaacatggtgaaaccccatctctacaaaaaaatataaaaattagccaggcatggtggtggcgcctttaatcccaactactcaggaggctgaggcaggagaatcgcttgaatccaggagggggaggttgcagtgagccgagatcgtgtcactacgctccagcctgggtgacagagcaagactctgcctcaaaaaaaaaaaaaaagaaggccaggcgcagtggctcacacctgtaatcttagcactttgggagaccgaggtaggcggatcacaaggtcaggcgatcgagaccatcctggctaacacagtgaaaccccgtctctactaaaaatacaaaaaattagccggccatggtggtgggcacctgtagtcccagctactcgggaggctgaggcaggagaatggtgtgaacccgggaggcggagcttgcagtgagccaagatcgagccactgcactccagcctgggcgacagagcgagactgtctcgaaaaaaaaaaagaaaaatgaggctcatcgtccctgtcttgttgggtcattgtggaaaaactgccaactgggatttgtcatcatgagccccgccatctttatcctgggatctatcactctccagatcctgtttggttgtttttgtttttgtttgagcctctactccatgccacgcccattttatagacggggaaaccgaggctcagagagcctaagtcacttgcctagggtcccctacccaggcggcagcaggaaccagctttggacaaagccctgtctcacctcagctcggagatcctaacactgaagttccttgagaacttactatgtctcaggccctgtgctaagcattgttttgttgttgttgtttgtttttctggagacagggtcgctctgtgtcacccaggctggagtgcagtggcgtgatcgtagctcactgcagtctccaactcctgggctcaagtgatcctcccgcctcaacctctcaagtagctgggactatgggtatatgccaccatgcctggctaattttagaatttcttgtagagatgaggtcttgctgtgttggccaagctggtctcgacctcctggcctcaaacaatcctcccaccttggcctcccaaagtgctgggatatcaggcgtgagccactgcacttggattatagcaagcactttggctataactgctctaaagtcacccgacctgatgaggaaaaactattcactgtattttgacagcagagggaactggcacagagaggtcaagtcacttgctcaaggtcacacagcaagtaaatgaaacagaggattgaatccaggttgtataatttacaggaaccccagctaaaggctgtgaatgccgcaattaagataaggtccagcaccccaacccccttcttttgcagcctctgaggttggcaggggatccctggggactgccaagctgctgttcaggattggtggggtgtggggaagccagctgtgtggggttggacccgcgcccactccctgctctctcacagctgccaacgcacagcctggcgcctccaccaccccgcctcctctaattgctaattggcccctttgacatcagaggggtgggaagaggtgggtaacacagccataacacacccctcccttgaggcaggcacgtgtcccccgccagcaggctggtcctaccagctggagaggaacaggcatctctaggggctgagagctgggtgcttcattctgccagagggggctggacagaggcccggggcccacaggcacctctcacagagcaggaggcaaagcctgcatccccttgggtttcccgattctgcccaggatgggtccataagtgggggacatggcaaaggggacagtgcatagggtgcacccctgcctggtgcataacgctagatatgtcttggccctctctggttcacctggctcatctgtaaagtgaggcagctggcgttgctgacctggaaagctatctggagggtttcttccaactttgagagtctgtggcttttttttttttttttttttgagacagagtcttgctctgtagcccaggctggagtgcagtggtacaatctgagctcactgcaacctccccctcccggattctcctgcctcagcctcctgagtagctggaattacaggctcacaccaccatgcccagctactttttgtatttttagtagagagggggttttcatcatgttggccaggctggtctcgaacccctgacctcaggtgatccacccaccttggccttccaaagtgctaggattacagggatgagctaccgcgcccagctgatggctttattttatttagagacagggtctcgctctgtcgcccaggctggagtgcagtggtgcactcatagctcactgcagcctccagctcctgggctcaggtgatcctcttgccttagcctcccaaaatgctgggattacaagcatcagccactatgcctggctgatgactttcaattttgtatcctaaaattcttggattatgggccgggcatggtggctcaggcctgtaatcccagtactttgggaggctgaggcaggcagatcacgaggtcaagagatcgagactatcctggccaacatggtgaaacctcgtctctactaaaaatacaaaaattagctgggcgtgctggcacgtgcctgtaatcccagctacttgggaggctgaggcgggagaatcgcttgaacctaggaggcggaggttgcagtgagccgagatcgcgcccctgcactccaaggcctggacgacagagcaagactctgtctcttaaaaaaaaaaaaaaaagtttgatatgaagaatttagagttttttgtttctaggagtttaagactcaaaagtcttaagattctaggatcctccccactgcccctccctctccccgctggctcccgtacctgggtccacaaagagccttgttatgttgccctcagcctcctccaactcaggaatctctacggccgcccagcacacgtacgccccgctgtggttgaggctcacagggtccagctgcagggtgagatggctgggtgcctgccaggagagccgtccctggggcccgcagacccccaggctgaggctgccgttggtgatgtacggttgacacaggatggccccatcctttgtccacttaacacggagccgttcccaggctgtggcctggtccacctggcagaccagggtcgcctgactgccctgcctcacctgcagcaagttgggcccctgctgcacgctcaggcttgaggcttcttgcagggctggaggacagaagaggtagaggcgacctttctgactgtgcgcatgtgaggctgtgtgactcactcccctagtgagcccgcagtctgggtttgaaacctcacttgtctaagacgggtgcagtggctcacgcctgtagtcccagcactttggaagcccgaggtgggaggattgcttgagcccaggagttccagaccagcctgggaacatagcaagacctcatctctacaataaatatttaaaaagtagctgggtatggtggcgtgcaccgtgggcccagctatttaagagactaagtgaagggatcgcttgagcccaggcgttcgaggctgcggtgagctatgattgcaccactgcactccagcctgggtgacaaagcaacaccctgtctctaaaaatttaacataaaaaaaaaaccaaagaacctcactgtctgtatgacctttggaaggtcatgtcttgctgaggctcaacaaccccatctgtaagatgggtataagtcgctcagagcttgtggaattctgagatagtctccagtactcagctacacaaataccgcctagtatatgccaggccctatgctgggtgtggggaacacagacacaggcatgaccaaaacagatgaaaatccctgcccttcagaagctgacaatctagggcaagagagacacaggaagtcgtgaaatgagaactgcagtgggggaaaggaatggcagtggcctcagcagacaccagtgaggtcagggagcatctattccttgagagtaatcagggaaggcctccttgaggtggtgattttttatttttttaattttttttgagttggggtctggctctatagtccaggctggagtgcagtggcaccatcacagctcacggcagccctgaactcctgggctaaagtaatcctcctacctcagcctcccaagtagctgggactacaggcatgtaaccactatgcctggctaatttttttggttttgtagagattggggtctcactgtgttgcccaggctggtgttgaattcctgggctcaagtgatcctccccgctaacgcctcccaaagtgctgggattgtagatgtgagccactgtgaccggcctttttttttttcttaagaccacgccactgcactctagcctgggcaacagagtgagactccatatataagaaaaaaagactccatctcactctgttgcccagtctggagcgcagtggcaccatcaaagttcattgcagcctcagccgcttgggctcatgggctgggtgctgtgactcatgcctgtaatccctgtactttgggaagtcaaggccggtggatcacctgaggtcaggagttcgagacccgtctggccaacgtggtgaaactccatctctactaaaaatacaaaaattagccagtgtggtggcgggctcctggaatcccagctacatgggaggctgaggcaggagaatcacttgaatccgagaggcagaggttgcagtgagctgagaccctgccactgcactctagcttgggcaacagagcgagactccatagcaaagaaaaaaagactccatctcattctattgcccagtctggagtgcagtggcaccttcatagctcactgcaggatcaacctcctgggttcatgggccgggtgcagtggctcacgcctgtaatcccagcactttgggaggccgaggcgggtggatcacctgaggtcaggagttcaagaccagcctggccaacatggtgaaaccctgtctctacttaaactacaaaaattagctgggcatggtggcgggtgcctgtaatcccagctacttgggaggctgaggcaggagaatcgcttgaacccgggaggtggaggttgcagtgacctgagatcgtgccactgcactccagcctgggtgacagagcgaggctctgtctcaaacaaaacaaaacaaggccgggtgcagtggctcacgcctataatcccagcactttgggaggcagaggcgggcggatcacgaggtcaggagatcaagaccatcctgcccaacatggtgaaaccccgtctctactaaaaatacaaaaattagctgggtgtggtggcatgtacccgtagtcccagctactcgggaggctgaggcgggagaatcacttgaacccgggaggcggaggttgcagtgagctgagatcgcgccactgcactccagcctggcgacagagcgagactgtgtctcaaaataaaaaacaaaacaaaacattcctgggctcatgtgatcctcccacctcagcctcccaaattactggtgttacaagtacatgccactgtgctcagcctgaccagggatcttaatggaaaggtataaccagtgtgagaaggaaggtattggggggtaagagcattccaggcagtgcacagcccatgcaaaggccctggggcaggactgtgcctggcgtgttggaggaacagcgaggaggcccgtgtggctggagcagagtgaggacagggagagagggaggaagggttgggcagggcctgtgagccttggggtggtgtggggaggtgaaggaagttaagcagtttatgttttaatgtaagtgtgatggaaaatcagaaagcagggaagaaatagtccaattgaagtttttgtttttgtttttgtttttgttttgagatggggtctcactctgttgcccaggtgggagtgcagtggtgtgatctcggctcattgcaacctctgcctcccaggttcaagtgattcttgtggctcagcctcttgagtagctgggactacaggcactcgctaccacgcccagctaatttttgtatttttggtagagatggggtttcaccaacatggccaggctggtctggaactcctgacctcaagtgatccacctgcctcagtctccaatttaagttttaataaaaagaccttggttgggtgtggtggctcatgcctgttatcccagccctttgggtggccaagactgggtgattgcttgaggccaggagttcaagaccagcctgggcaacatagtgagacccatctctaaaaaacaaaaatgactgggcacggtggctcacgcctgtaatcccagcactttgggaggccaaggtgggtggatcatgaggtcaggagttcgagacccacctggccgagatggcgaaaccccgtctctactaaaaatacaaaaaaaattagccaggcgcagtggcgcgcgcctgcagtcccagctactcgggagcctgaggcaggagaatctcttgaacctgggaggcagaggttgcagtcaaccgagatcgcgtcactgcactctagcctgggtgacagagcaagactccttctcaaaacaaaacaaaacaaacaaacaaaaaaacacaaatgaacaacaaaaaagtgcaagcggctggaatcagaggagagggaaagaggaatggaggttttcgccccaggaaatgtgtgaagggcagcagcctttgtccttaattggaaacacagagggagctgctgccggagtagaaagtctgcttttagctgtgagaagtctgacgtgtctgttagacccccggagaagttgaggttatgtgaagttcctggcatttgagatgcaattgcagaggagggtagagacatgagatctggagaagggtattaggcagctggaacagcaggtgcaaaggctcgaaggccagatccagccttcccattgcggaaacagagaaagaaaagtccccaggctagagcaagagggagggagcaaaggcactgcggagggtggagatgagagaggccaggccaggctggtatgtagggcaaggtttagattgtatcctaggggccctcagaggatccttccttaatcctccagcccccatcacgttctgagtctcggagggagatgggccttatctgacagtagagagactgaagtttagaggggccctgagctggggggcaggcagctggggatgacagcaagagtggggttcagaggggagggaggcccagatactcaccccagatctgcaccaggaggcccagcaccatgcccggggaccccattcctggcccatcacccccctctccccctcccagttgacagacttcctgccacaatctccgcctcccgctgcagaagcagatgcaacacccagggccagacaacagacgtccggtgttccagcctgctgggggctccacttcctgccacctcgtgcctcagtttccccaatgcattttctatctgaaaggcagtgtacggaccaggcaacatggctcatgtctgtaatcccagcactttgggaggccgaggcaggtggatcacctgaggtcaggagttcgagaccagcttggccaacatgatgaaacccctactaatttctactaaaaatacagaaattagctggacatggtgatgggcgcctataatcccagctacttgggaggctgaggcaggagaatggcttaaacccgggaggcggaggttgcagtgagccaagatcacgccactgcactccagcctgggcgacaagagtgaaactccgtctcagaaaaaaagaaaagaaaggcagtgtatgcaagtgagtgggaggaatccacccctgtgagctttctggaaggctctacataaacacatctaggtacaggaagacacagtgcgagagcaggtggctccgtgggggaggggcaggcgacataggcctgagcagtgagttaaatgacagggtccctgcctcaattattttgctcccaaaatgtctttcttttgctgggcgctgtagctcacacctgtaatcccagcactttgtgaggctgaggtgggaggatcacttgagccgagtttaagatcaacctggggtaacacagcgagatccaatctctattaaaaaaaaaaaaaaaaaaaaaaagatacaggctgggcatggtggcccaggcctgtaatcccagcactttgggaggccaaggcgggtggatcacctgaggtcaggagttcaagaccagcctagccaacatggcaaaacccggtctctactaaaaatacaaaaattagctgggcctagtggtgggcgcctgtagtcccagctactcagtggggttgaggcaggagaatcgccagaactggggagatggagattacagggagccgagatcctgccactgcactccagcctgggcgacagagtgagactgtgtctcaaaaaaaaaaaaaaagatacaaaaccaacccagggtgatggtgcatgcctatagtcccagccactcgggaggctgaggcaggagaaccgcttgagcccaggagttggaggctgcagtaagccatgattgcgccccgttactccagcctgggcaacagagtgagtccgtctctaaaaaaaaataataataataatttaaaaaatcttcctttgaggttcagagaaatagatttctgttgataactttgggtcctattacatgacctgcttgggggtcccgtggaggaggttcatgggctctcgagttcctcccagccctgcatccctcacccctgattctgtagtgcattctgggaggaggtggcgaacccacagacctcaatgtctcagacccaactgcagagtgacctcctttctcactcggacctagaaggcctgcatcgtacacagcgttcccctccaccacagggaggttctgcggtggctatgcctgcacctcccctgcagacacgtacacccgcccagcctcccctacccactccttcccctccccagaacattctgaagctccacccttccccccaccgtctgctgagggaccctggatagattagcccccaggtccttccaaagctggacccagacattcttagcttccgcacctgggctggcacggagacttctggaggagctgttggagcctggggctttgtggggtgtataggagttcagttgtgacatagggacaaatggaaagaaggcactggaggctaaacaccctcttgggcaaaagccttagattttcagtaaatgccaggcgggctagacaatttgagtagcaacggataacctgtgtgagtgaacaagtggggaaactgaggcacgggagcattagagatgattctgaggtcccacggcagggccaggggtcgagccccttgtcttctcatccaaggctctctccagctcacatatcaccaccaacaccgcccagtgagccccaggcgctggatgtgagggctctgggcgaggccagcgcggaactacatttcccaggcggccgcggcgggtgcgcctgcgcaatgcgcgcggtgatggagcgctaaccgggggcgcggcggcggcgagggctcggcgggccattggctaccggccgcggcaaaggcagcttggggacccagcgtgcgcggggcccgcgggccgggccggggtgacctgggctgcagccatggaagaacagagggtaggacggggtggggcagggcgggcccgcaggggcgtcgggggcggggaaggggaccaggtgttgccgcagcgcccccactccctccccgcctccaccccagctgctctgcggctgaggccccaccccattcgcgaccccgcccggatctagcccccctaccccagtttgggacgcagcccccccacatcttggcttggggccaggcacgtgccttctacgcccccccaccctgcccagtatcccagtcccatccctgacccccatcccccacgccctccctcctggccgcggaccaggcgtcccggccccccgccccacccctggaagacgccccgccagctccgcagtgcggaccccaccgaccctgccccaggaaaaaggagcaggttggagcctgggtcagagcaagaggctcccgagcgggatcctccctcccagaatcccctgcccttccccaagacctccctgccccctccccgcttacctggcgcccccgcatccctggcccccaggttccacctttgcccaggtaatttctttctccttgcttatctttctcccccaggtaggccccacccctgttccgaggctagcccctatcccaggctatcccacctccctggggtttttccttccaccgagaaccctttccccaggttagcccattttccagcagacatccttctcctctggggttttctgtcctcaggctagcccctcacgccccaccttcaggatgtaggtatcgggttgtagcctttgtgctcaagcacgcctggttcggggccagggtctgtcccttcctgagaggttctctgtgagcctcagtttcctctcctgtaatatggggtagcttagggcgcccagctgctatgggtgaattgtatcagcccggagctttacctcctggctggtgcccaagctcaatagcgtggcagcccccacatctcctctctggatccctggaggggagcgcgggtcagggagcctggccaggctgacgggctcacctgcctgccgtgtgtgtgtgcgcatgtgtgtgcatgtgtgtgcgcacgcgtgtgcatttatgtacgtgtgtgcatgtgtgtgcacgtgtgtacatgtgcgtacacgtgtgtgtacctgtgtgcgcacatgtgtgtgtgcacctgtgtgtgtccacacttctggtggtgcaggaggccctgaggaagatcatcaaaacactggctgtgaagaatgaagaaattcagagctttatctactccctgaaacagatgctgctgaacgtggaggtgaaggcggtggggcagtcctggggaggtaaggggaggggaggaagctggagggtgcagccttaggaactggcccattgctgttgatgcctgtgggaggtctcaggttccctctctgaacacgggctttggccgattctggctgttccgacccaggcgaactcggcgaaggtgcaggaggacctcgaagcagagttccagtccctcttctccctcctggaggagctgaaagaaggcatgcttatgaagataaaacaggaccgtgccagccgtacctacgagctgcaggtgagggctgagggcatcttcctctccccccgcccctcctactcaacagaacgtagctgacctcggcaccttcctccaaaaactgggtgctctcgagtttctgatctctcccctgacccctccatccacctgtacactctctcttttttttttttgagacggaggtctcgctctgtcgcccaggctggagtgcagtggcatgatatcggctcactgcaacctccgcctcctgggttcaagcaattctcctacctcagcctcccaagtagctgggattacaggtacccgccatcatgctgggctaattttcgtatttttagtagagatggggtttcaccgtgtgggccaagctgacctcaggtgatcctcctgcctcagcctcccaaagtgctgggatgacaggcatgagcccccgcgcctggcccatctgtgctctctctgaatcccctctccatcacggcgtccccgagtctggctcagatcttcccctcctgtcttcactcagtgcctccggtttctcagcccttcccactggccccccagatctgaaggtatcacctccactcaaacaccacccatggctcccgtgggctgtcactcagactccaagctggagtcacacaggctgcatccagacctcctgggcaacttcctgacatcccagattcctgtcccagggggaatctagagccctggagctcggatgtggcctaggcatgtgagtttttggtttgttttgttttgagacagagtcttattctgtcacccaggctggagtccagtggcgcaatcatgcctcactgcagcgtccgcctcccaggcttaagcgattctcccatcttagcctcccaagtagctgggaccacaggaaggtgccaccacgcccagctcatttttgtattttttggtggagactggttttcaccatgttgcctagactagtcttgaactcatgggctcaagcgatcctcctgccttggcctcccaaattgctgggattacaggcatgagcctctgtgcctggctcatgtgagttttttttgttttgttttgtttttgagatggagtctctctctgtgacccaggctggatcagttgcacaacctcagctcactgcaacctccgcctcccgggttcaagtgattctcctgcctcagcctcccgagtagctgggattagaggtgcccaccaccacacccagctacttttttctatgtttagtggagacagggtttcactgtgttggccaggctagtcttgaactcctgacctcaggtgatcctcccgcctcagcctcccaaagtgctgggattacaggcctgagccaccacacccggccttacgtgtttttagggaagggattccccagggattctgttctgctccccgagcccagccccatttggtggggcgctcaaggctccaatctccatctctcacctggagttcgagaagggcatggtaccctggattctgaatggggtggggagccctcagggggcctgaggcagtggggtgagttgtcccctcctttggtgcctggtatccacagaaccagctggctgcctgcacgcgggccctggagagctccgaggagcttctggagacagccaaccagactctgcaggccatggacagcgaggactttcctcaggtgggtgcctctgatgctgccaggtaaagaacagtgtgcccagtcacgtttgcatttcaggtgaacaagcacatttttagtgtaagtatagcccacccatgcgatagttggcaaaagtacatactgataccaagaaagtgtccaggccgggcacagtggctacgcctgtaatcccagcactttgggaggctgaggcagtggatcacctgaggtcaggagttcaagactagcctggccaacacggggaaaccccatctctactaaaaatacaaacattagctggatgtggtggtgggcgcctgtaatcccagctacttgggaggctgaggcgggagaatcgcttgaacctgggaggcagaggttgccgtgagctgagattgtgtcactgcattccagactgggcaacagagggagacttcatctcaaaaacaaagaaaaaaagaaaagaaagcattcaggctgggtgcagtggctcatgcctgtaataccagcagtttgggaggccgaggcaggaggattgcttgaggccaggagtttcagaccaacatgggcaacatagtgaaaccccatctctacaaaaaataaaataattggccaggcacaggggctcatgcctgtaatcccagcactttgggaggccaaggcgggcggatcacgaggtcaggagatcaagaccatcctaacacagtgaaaccccgtctctactaaaaaaaaatacaaataaattagccgggcgtggtggcgggcacctgtagttccagctactcgggaggctgaggcaggagaatggcgtgaactcgggaggcggagcttgcagtgagccaagatcgcgccaccgcactccagcctgggcaacagagcgagactccgtcgcaaaaaaaagagattgagaccatcttggctaggacggtgaaaccccgtctctactaaatatacaaaaagttagccgggcatggtggcgggcacctgtagtcccagctactcaggaggctgaggcaggaggatggtgtgaacccgggaggcagagcttgcagtgagcagagatcgcaccactgcactccagcctaggtgacagagcaagactctgtttcaaaaaataaaataaaataaaataattagctgggtgtggtggcacacacctgtggtcccagctactcaagaggctgaagtgggaggattgtttgagctccagagttcaaggttacaatgagccgtgattgttacactgcactctagcctgagggacagagccagaccttgtctcaaaaaaaaagaaaaaaaaagtattcattgttgatctgaaatgcaaatgaataaatacttttttagtataagggtatatatgtgcacactaagaactgcatttgtgtgagtatatcccaaagagtgcatgggacatagtcatgatttatctgaaatgccaatttaactgggcatcctgtagttttattcagtgaatttgccagctgtatgggctgggtgtgggcaggaggttggggtggggatgggagcctgtcttggccatcctctgtcttcagggcacagtccagaagtgcagggacactttggcaaataccttcctcgagaggcctcagtcttcatgtctgtagagtggctttatgatttggtagaaacaaatctttgggccgggcgcagtggctcacgcctgtaatcccagcactttgggaggctgaggcgggccgatcatgaggtcaggagatcaagacaagcctggctaatacagtgaaaccctatctctgctaaaaatacaaaaaattagctgggtgtggtggcgggcgcctgtagtcccagctactcgggaggctgaggcaggagaatggcgtgaacccgggaggcggagcttgcagtgagccgagatcgtgccactgcactccagcctgaacgacagagcaagactccatctcaaaaaaaaaaaaacacaaaaaatgaaacaaatctttgggccaggcacggtggctcatgcctgtaatcccagcactctgggaggctgaggcaggcggatcacctgaggtcaggagtttgagaccagtgtggccaacatggcaaaaccccatctctctaaaaatacaaaaaattggccgggtgtggtggtgggtgcttgtaatcccagctactcaggaggctgaggcagaattgcttgaacccaggaggtggaggttgcagtgagccgagatctctccactgcaatccagcctgggcaacagagcaagactccgtctcaaaaacaaaaaaagaaatctttgaatgttgttctgttcctctctctaggctgccaagcaaatcaaagatgggtaagacactggggtctggcccccaccccactaccctgcccctggtgtgaagacaggggccacctggtgagggtgtctcatctcagagccctggacgggagccctggggaggggccccctcgcgccacggatgaccaggcctggtcccccacgcaacgcctgccacctccttcctgcagagtgaccatggcccctgccttccggctatcattgaaagcgaaggtcagtgacaacatgagtcacctcatggtggacttcgcgcaagagcggcagatgctacaggcactcaagttcctgcctggtgagaggggcacgcactagagggccaggacttccggggaatgacctgggaggctaggaggccctgaaacaggacctggagtatggtggacgacccggtgtctgaattccgcctgggggaggtggagctctgagaattccacgccctgtggggggtggagttctcatggagccccgcccctgggtggagccatgggaagaccccacccactgtgtagtgacatcctgggaaaactctgtacccaggggtggaactgtgagaataccatgtcctgtggggttggttgagtcctcatgaggccccgccctggggtggagccatgagaaggtcaaactcaccaggtgggaaaatcctgtccccaggggtggagccctgagaatagcacgtcctgtgggggtggggtattcatcaagtcccgcccatgggtggagccatcagaaagccccacccaccagggggtgaggtcctgggaaaactctgtccacaggggtggagccctgagaataccatgtcgttgggggagtggagtcctcccgagacctcctccctggatagagccacgagaagggcctgcccaccacatggtagctcctgggaaaaccctgtttccaggggtggagccctgagaaggccacgtccccgaggagaaatggactgagaacccagcctgtctatgatgcagccccaaagaaagccgcatccctcattggcagagattttggaataattctgcctgtaaatgatggaatcccaagaaagctcagccctcccccaacccactgatggaaccttagcgtctccatggccgggcgcggtgactcacgcctggaatcccagcactttgggaggccgaggcgggtggatcacttgaggtcaggagttcaagaccagcctggccaacatggagaaaccctgtctctactaaaaatataaaaaattagccgggccatggtggctcacgactgtaatcccagctactcaggaggctgaggcaggagaatcgcttgaaccagggagtcggaggttgcagtgagccaagatcgtgccactgcactccagcctgggtgacaagagcaagactctgtctctaaaaaaaaaaaagtctccaccctgccaaacatggaacccctttgtggccatgcccccaaaattgtccaacatgtggttgggcagccctgcagcaagccccctgccccctgaaccaggcacagaatcccgaccccctctcctttccgtcttggtcagtgcccagcgcacccgtgatcgacctggctgagtccctggtggcagataactgtgtgaccctggtgtggcgcatgccggatgaggacagcaagattgaccactacgtgctggagtaccggcggaccaacttcgagggcccgccccgcctcaaggaggaccagccctggatggtcatcgagggcatccggcagacagagtacaccctgacaggtaagggcagtgtgtgccagctccgcccagctgtgaacagccacctcttccagcctcccgtctcgccatcagtcactgggggccttggggacgatccccaaagctcatggggtctggaagcagcctggggaggtggatcagaaatatgagacagtggccaggcgcggtggctcatgcctgtaatcccagcactttgggaggctgaagcgggtggatcgcctgaggtcaggagttcaagaccagcgtggccaacatggtgaaaccctatctctactaaaaatacaaaaaaattagccgggcatggtatcgggcacctgtaatcccagctactcaggaggctaaggcgggagaattgcttgaacccggaaggtggagatggcactgagccgagatcgcgctattgcactccagcctgggcaacaaaagcgaaactcatctcaaaaaaacaaaaaataataataatgaatataggccgggcgcggtagctcacgcctgtaatcccagcactttgggaggccgaggcgggccgatcacaaggtcaggagatcgagaccatcctggctaacacggtgaaatactgtatctactaaaaaaatacaaaaaattagccgggcgtggcggtgtgcacctgtagtcccagctgctcaggaggctgaggcaggagaatggcgtgaactcgggaggcggagcttgcagtgagcctagattgcgccactgcactccagcctgggcgacagagcaagactccgtctcaaaaaataaataaataaataaataaataaataaataataataatgaatatatttttccagacatgggatcctgccatttccctaggctggtctccaacccctggcctcaagcagtcctgcctcagcctcccaaatagctgtgtactgtcctcggagcagggaacaaagcagacaataatcttttccctcctagagctggcgttctggattcaccctccaagtatttggggtcctccttggcagttacaagaaattgaaagctggccaggcatggtggctcaagcctgtgatacagcactttgggaggctgaggcaagaggattgcttgaggccaggagctggagaccagcttgggtaacaaagcaagagcccatctataaaaaaaaaaaaaatttaaagttacctgagcatggtggtccccgctaccaagggaggctaaggtgggaggattgtttgagcccaagaattggaggctgcagtgagccatgactgcaccaccgcactccagcctgagcaacagagcgagaccctgtctctactaaacaaagagagaaaaataaagaaaaaaaaaaacaaaacccaaggaatccacccagctggtggaggtagggtctgaagggggaaagcctcctgggccgggcgtggtggctcacacctgtactcccagcactttgggaggcttaggcgggcggatcttgaagtcacgagattgagaccagcctgaccaacatggtgaaaccctgtctctactaaaaatacaaaaattagctgggtgtggtggcgggcgcctgtaatcccagctactcgggaggctgaggcaggagaattgcttgaacccaggaagcagaagttgcagtgagctgagattgcgccactgagctccagcctggttacagagcgagactccgtctcaaaaaaaaaaaaaacaaaaagccatcctggccaggcgtggtggctcacgctgtaatcccagcactttgggaggctgaggtgggtggatcacttgaggtcaggagttcaagaccagcctggccagcatggtaaaaccctgtctctactaaaaatgcaaaaaaattagtggggcatggtggcggatgcctgtagtcccagctacttgggaggctgaggagtgagaatcacttcagcctgggaggcggaggctgcagtgagcagagatcgcgccactgcactccagcttgggcaacagagggagactccgtctcaaaaaaaaaaaagaaaaaaaaagccatcctgatccaggggaatcccggaggggcggggagaggctggctgacgggtttaactatcaccattcactagctgcttttgggctgtaatcagccagctagttatctgtaattagcatacatggttaatcatgagcacgctaactgcagggggaaaagtcatcagcctcaggagctgcaaacagccattggcttatcctttgcttgagaatcaaaataaacacaccccttttatttgttgtaaataggattcctcaaatccctcctccaagtgcccccgccttttggttttgttttcttgtaactttgtattttgaaataattatagatccacaggaagttgccaaaacaactaaaacaaaaagtacagtgaggacccatgtagtcagcataaaacccgggaaatggacacgggtgcagtggactcacattctaccttttttttttttttttgagatggagtctcgctttgtcgcccaggctggagtgcagtggcctgatctcggctcaccgcaacctccgcctcctgggttcaagcaattctcctgtctcagcctccctagtaactgggattacaggcgcccaccaccatgcctggctaatttttgtatttttagtagagatggggtttctccatgttgaccaggctggtctctaactcctgacctcaggtgatccgcctgcctcggcctcccagtgctgggatgacaggcgtgagccaccacgccccgccacattttaccagttttacacgcgctcattcgggtgttccacacagttttctcccatgtgtaaattcatgtcaccaccaacaccacggtcaaagtatagatctcttctgtcactacgaggcttccaggtgctacgctttataaccatggcttcctgcctttgacagacttcctagtgagtgaattcctcagggcagaaagttggattcatggaaagctgtgcaggagtaaggataccgatgaaagcagctgcctatgtggtcgtttgcaatccacctactgttttgttgattgcttggaaagatgggagggtttgggttattttcttctttctttcccttttttcttttttcttttttttgagacagaatctcgctctgtcgcccaagctggagtacagtggcttgatctcggctctctgcaacctctgcctcccaggttcaagcgattctcctgcctcaacctcccaagtagcttggactacaggcactataggcatgcgccccaacgcctggttaatttttttttttttttttttttttttgagacagagtctcactctgttgcccaggctggagtgcagtggtgctatctcggctcactgcaagctccgcctcccgggttcacgccattctcctgcctcagcctcccaagtagctgggactacaggcgcctgccaccacgcctggctaattttttgtatttttagtagagacgggttttcaccgtgttagccaggatggtcttgatctcctgaccttgtgatccgcctccgtcggcctcccaaagtgctgggattacaggcgtgagccaccgtgcctggcctttttttttttttttttttttgagttgcagtctcgctctgtcacccaggctggagtgcaatgatgcgatctttggctcactgcaacttctgcctcctgggttcaagcaattctcctgccccagcctccccagtagctgggattacaggcccccgccaccacacctggctaatttttgtgtttttagtagagacggggtttcaccttattggcgaggctggtctcttggccaggctggtctcgaactcctgacctcaggtgatctgcctgcctcagcctcccaaagtgctgggattataggtgtgagccaccgcgcctagccagttttttgtattttttagtagagacagagtttcaccatgctggccaggctggtctcaaactcctgaccttatgggttcctcctgcctccacctcccagatgtgctgggattacaggcgtgagccaccgcacttggccttttttttttgaaagacaggttcttgctatgtagcacaggctggagtgcagtgatgcaatcatagctcactgcagcttcaacctcttgggctcacatgctcctcctccctcagcctcctgagtaactgggactacaggtgtgcaccaccacacccagctaatttttttggagggggtcagagtttcgctctgtcacccaggctagagtgcagtggtgcgatcttggctcactgcaacctctgcctcccgggttcaagtgattctccttccgcagcctcctgagtagctgggattacaggcgccaccccccgcccccaccaatttttatatttttagtagagatgcggtttcatcatgttggccaggctggtcttgaacgcctgacctcaagtgatctgcccacttcggcctcccaaagtgctgacattacaggcgtaagccaccgcacccagactaattttttattttttattatttatttatttgagacagaatctcaaataaatgtgtcgcccaggctggagtgcagtcgtgcagtacaaatctctgaaacaatcactgtgacagggtcttaaagcatcctgattggtctacgtgggttggaggtggagtcaagtaattcatagcccctcagggagaggagggcaaggaatggtctcaggggtaagatgtttgtttattttttattttttattttttttgagatggagtttcgttcttgttgcccaggctggagtgcaatggcatgatcatggctcactgcaacctccacctcccgggttcaggtgattctcctgcctcagcctcctgagtagctgggattacaggcacacaccaccacgcccggctaattttttgcatttttagtagagacgggggtttcaccatattggtcaggctggtctcgaactcccaacctcagttgatccatgcgcctcggccttccaaagtgctgggattacaggcgtgagccagtgcgcccggctggataagatgtttataaggtggttcttagaatggcgttgggaatcactgtgggacatgacagctttaacccatgactcagagtctcagggaataatacacagtgttgaaatgcctctcttgcctaccaggtctcaagtttgacatgaaatacatgaacttccgtgtgaaggcctgtaacaaggcagttgcaggagagttctctgagccggtgactctggagacaccaggtgactggattccacccttgtcctacccctaactccatggccccttcctcccacagcccccagagaccatgagaatcctcgaagcagggttgccctggctgccaggaagctcaaagctccgtccacagttggcttccttagcctgagtgtctgctataaccctgtttttgtcctttgcttctgaggtttacccagtatatctcgatggtttttgtatacagccacacacactctctctttgccaaaaaatagataagtcctctatagagctggggatgagatttgagtagtgaagactgattccagagcctttcacagtgacaccttcacatgccctgctaggaagtccctctgaaatctagcctaactcccttgtgctgtagcccagccccttttttgggattagtcctccatggaagcacagggtagtgcaattggcttgaaaatgcctccagaggctgggcacagtggctcacgcctgtgatcccaacactctgggaggctgaggcgggcggatcacgaggtcaggagttcgaaaccagcctggccaatatggtgaaaccccgtctctactgaaaatacaaaaattagctgggagtggtagcgtgtgcctgtagtcccagctacttgggaggctgaggcaggagaatcgcttgaacccaggaggcggaggttgcaatgagccgagattgtgccacagcactccagcctgggcgacagagcgagactccatctcaaaacaaaaagaaaagaaaattcctccagacgtgggagggagacttttaggcaacaacccttggccttcgcgcttctggctccatgttctgtcccctctaccctttgccatcttgtctctcctgttgtccttctgcttgtccatctctatatctgtctctctccgaggcttcgtcagtctcttatctctgtcttggactcttatctccttggctctttgattctctgtccctgtcttggtctgtcttggtcactctctgtctctctgtctctctctgtgtctctccgggtttccccatctctgtgactcccacgtctgcccggccccagcgttcatgttccgcctggatgcgtccacatcccaccagaacctgcgggtggatgatctctccgtggagtgggacgctatgggcgggaaggtgcaggatatcaaggctcgcgagaaagatggcaaggggcggacggcgtctcccatcaactccccagccaggtagcctgccccctcccctccctaagtctctggtggaggagatcagtctggacatggacacagagcccagtgtggtcagagttggggtggagaggggacctggggctggtggaacccagagagggaatgaagggagaggaggttttgagtggagttttgatggttaaataggagtttcccagatgacggagggcacaggcatgttctgacataaacatgaggtgctcgatatatagatagagccaaatactgccagagattgacccaacatccacggtggctggggtggactagggtagccttaccgtgggagagagaagtgttgaactgagcctcctgagcctgcccactccctgcccaccacagaggtactccatctcccaagaggatgccctcaggtcgtgggggacgggaccgcttcaccgctgagtcctacacagttctgggtaaggaaggggagaagaaaggggagaggggagttttgggcaggggcctaatggtgggggttgagggagaacctttgcctttggctgcggaaacaggcagccatcagcaaagctgctcccggaataacaggttgttctggcactgcccaaatggaaatatttcgggataagggattgctggggaaagccagaatttatggagtgaaggaaagagactctggaccagacagtgcctgggcaggagcttgggggcaattttctggactccatggagtatctggcacttggggagtagctgggatttagggagtagctgggatttgaggagtagctggaaagaatcattgcctatagagcaactgggtttgtgggggagctgaagccaggcaggaattttgggggatcacctgagggtatgtggaggagccagagaaaacagtctgaagagaagtcaatagtagcataagaatgattggatcctgtgaagaagaagctggagttggtggaggatgggcaagggaggaactggactttaggggaattgctactgttcagaatagagctggagaaagaggctaaaagtatgaggaagtcattgtggtcaggaatatctagagagaaggaagttagggagtagctggggtcatgaggataagctagggcctaaggggaagttatggttctatggggatctaaattttcctgggtgcacctgggattggtgagagttttagggagaagcagaagatatagggagttgtcattggagttgctgagatttgagagagagagagagatcatccttgggaaaggacctggataatttgtggtgtggggagtagctgagatcagggaggagcagacctggagaagacgtgtatagaggttcatcttgtatctggagaggaactgagatataacaaagatcagttgtgatctgggaggggcgagagtatgaggagaagctgaagctcatggaatagctgcattgggtgaaggagtagctgagatggcaagaacctggatctggggcctggggaggatctcaactctggagagaatctggattgtgtacagagctgaagccaaggggtatcccaattcagagggttcctggagagtgtgatggaggtttgaggaacacctggattccaggaggagctgaggcctggagagtatctggcttggggaatgccttgggggaacttctggcctcagcagtagctgaggcctgggagaacctgccttccacgtggagttggggtctggatagaatctggattcagagagcaagaggagggagtcttgagtcctggggagtatctggactctgtcacagcaaggagctagagggagcttctagactctgccagagctgagaactagggggagcatctggaccctgccagagctgggaactagggggagcatctggactcgaggaggacttgaggcctgtgggaacactatgagtcttccaggaacaagggtttgaggatgatctagtttctgggaagaactgaggggtatttggacatggggaggaactgaaagaagtttctatggcttggaggagtctggaaggagtagcttgggcttgtagagaatctgaaaggagtaactgaggcttggggagtatctgggcttaataaatttctggaggaagttgataaagcttaggagtatctggggggaatacccgggaatcaaggaatatctggagggaatagctgggacttgaggagcatctggagggaatagctgcagcctgaggagtatctggggggaaaagctgggactgaggagtatctgggggaaacagctgggactgaggagtatctggaggggaatcgctgggactgaggagtatctgggggaaatagctgggactgaggagtgtctggaggggaatagctgggactgaggagtatccggggaaatagctgggactgaggagtatctggggggaatagctgagactgaggagtatctggaggggaatcgctgggactgaggagtatctgggggaaatagttgggactgaggagtatctggaggggaatagctgggactgaggagtatctggaggggaatcgctgggactggggagtatctggagggaaatagctgagactgaggagtatctggggaaatagctgggactgaggagtacctggaggggaatagctgggactgaggagtatctggggggaatagctgggacctgaggagcatctggagggaataactgcagcctgaggagtatctggggggaatagctgggactgaggagtatctgggggaaacagctgggactgaggagtatctggaggggaatagctgggactgaggagtatctgtggaaatagctgggactgaggagtatctggaggggaatagctgggactgaggagtatctggggaaatagctgggactgaggagtatctggaggggaatagctgggactgaggagtatctgtggaaatagctgggactgaggagtatctggaggggaatagctgggactgaggagtatctggggaaatagctgggactgaggagtatctggggggaatagctgggactgagaagtatctgggggaaatagctggatccccgaggagtatctgggaggaatggctcaagccagagaagtatctggagggactagcagagactgaggcatatctgaagggaattactggggcccaaggagtatctggagggaatagctgggacccaagtatttggagggaataactggagtccaaggagtatctggggggaaatagctggggcccaaggagtatctgaggggaatagctgggaccctgaggagtatctgggaggaataacttggatcccgaggagtatctgggggaaatagctgggtccccaaggagtatctgggagaaatagctgggtcctcaaggattatctgggaagaatagctgggatcctgaggaatatctggggggaatagctgggtccccaagaagtatctggcggggggatagctgggatcccgaggagtatctgggaggaataacttggaccccaaggagtatctgggagaattacctggggcccaaggagtatctgagaggaacagctgggtcctcaaggattatcggggggaatagctgggatcctgaggaatatctggggggaatagctgggtccccaagaagtatctggaggggatagctgggatcccgaggagtatctgggagggataacttggacctcaaggagtatctgggagaattagctggggcccaaggagtatctgagaggaacagctgggtcctcaatgattatctggggggaatagctgggatcctgaggagtatctgggggggcggatagctgggtccccaagaagtatctggaggggatagctgggatcccgaggagtatctgggaggaatagctggagcccaaggagtatctggagggaatagcaggaaccaaggagtatctggagggaatagcaggaaccgaggagtatctggagggaatagcaggaaccgaggagtatctggaggatatagcaggaaccgaggagtatctggagggaatagctgggtccgaaggagtatctggagggaatagctggggcccaaggagtatctggagggaatagctgtggcccaaggtgtatctggagggaatagctggggcccaaggagtatctggagggaatagctggggcccaaggagtatctggggggaatagctgcggcccaaggagtatctggagggaatagctggggcccaaggagtatctggagggaatagctaggaacttgaggcgtatctgaagggaatagctggggttcaaggggtacctgaggggaatagctgggaacctgaggagtatctggggggtacagctaggaacctggggagtgtctctgcagggagcagctgtggtgtaaggagcaccttgggggctggccctttgtggaagggcatctgtggcccagttctatccagttcccctgcccacccctcctgccctgcgccacaggggacacgctgatcgacggcggggagcattactgggaggtgcgctacgagccggacagcaaggcgttcggcgtgggcgtggcctaccgcagcctgggccgcttcgagcaactgggcaagacggccgcctcctggtgcctgcacgtcaacaattggctgcaggtcagcttcacggccaagcacgccaacaaggtcaaggtgctggacgcccccgtgcccgactgcctgggtgtgcactgtgacttccaccaaggtgaccccaagccccagctgccgtctctggctgcccctgcctgagtcccctccgtctgcccccatcccacttctgaccggtcccactgtcactctgccccccgaccccaggcctcctgtccttctacaatgcccgcaccaaacaagtgctgcacactttcaagaccaggttcacacagccgctgctgcctgctttcacggtgagctgccctccgcggcccagggggaggagagggtggtgctgggcgctggggtttgaagctgagcccctcccccctccccccgctgtccctcaggtatggtgtggcagcttccaggtgacgacaggcctgcaggtccccagtgctgtgcgctgcctgcaaaagcgaggcagtgctaccagcagctccaacaccagcctcacctaggcccccaggcacccacccagctggggtgtttttgggggagtcgccgccaagcccaggctgctggagccaggcaccctcctctgtcacttgctgcttggagccttaactccagatgggggggtcaccaagagggagtgggcaccctggcgggccctctccccacctcacctcttaataaaggtcagacactggccaggcgaggccgcggtgctggttctttgggcctgggtgtggcaccgggacctcatccttcccagctgtaaaatgggcttttctcacagaatatggtggtagatttcactgagctgagggtcactgggagtaaatggggccatccgtaggcagacatctgacggacccctcgtcccctaatcccccaagccaagccagacacatgggtcctggggtcagagttttaatcctgggaaaaagaatctggccgctgggccatgccctgggactagcccgctggtccctggtgtgtccgaatcagtgctccagtgcccgcctcttctccagcttcttctgtagctctgccgtcatgtctgccagccctgggggttcaggaccaggagctgcagctggctcagggatccccagtccatgcccaccgccctgacagccacccaggaccagctacagatttgcagggccccgtgcaacaggacagtgtgctcgaaggcattaagaatttcaagacagagacagcagaaccttaaaagacagggcgcttcggagtgtggggacttgtgtgactgtacggtcacacacctgggaagcccgccccgcactgaccccgcagaccccttaccggctgtggggaagagaggctgggctgaactgactggcagcttcctgcccaagccaccattaaagactttgggctctggaagagaagacagatgaggccaggtgtggtggctcacgccggtaatcccagcactttgggaggctgaggtgggtggatcacttgaggtcaggagttcgagaccagcctgggcaacatggtgaaaccccttctctactaaaaatacaaaaattagatggacgtggtggcaggtgcctgtaatcccagctacttgggaggctgaggcaggagaatcacttgaacccggcagacagaggttgcagtgagctgagatcgcgccactgcctgggcaacagagtgagactccatctcaaaacaaaaaacaacaataaagacagatgagctgggtgcggtggctcacgcctgtaatcccagcactttgggaggccgaggtgggcggatcacgaggtcaggagatcaagaccatcctggctaacatggtgaaaccccgtctctactaaaaatacaaaaaaaaaaattagctgggcatggtggcgggcacctgtagtcccagctactggagaggctgaggcaggagaatggcgtgaacccaggaggcggagcttgcagtgagccaaggttgtgccactgcactccagcctgggcgacagagtgagactgtctcaaaaaaaaaaaaaaaagtcagatgagggctgaggctggcctgccatcaggtgagggtgggatatgggggggaccccaacctggcttgggtccaacgggtggctttggaagcttggcaggaggctttggcaacttctttggcttcaggatgactggccaactagaggaagccactgcgtggacaaaagtgtaacgtgtcacatcagctgttaacctgtttccccaacccccagctctcagcagctctgttccccacccaccatcttggttctcatagtcaacagctgggccatctccaatgggggtcacgtagttctcttcctggttcggtagtgggggcagtgggggcagcttgtcctggctagacgcaggtgacagcggcttggggccacctgtgcagggtgcaggacctgatggggaaacgtggtcactgtcaagacccatgtcatacagggacaccttgcaggttggcgggggggtctgtgtgcatgcctggagacaggcatgtgtccctgtgtgtctgtgtgtgtgcccatgtataagtctgtgtctgggccgggcgcggtggctcacgcctgtaatcccagcactttgggaggccagggtgggcggatcacctgaggtcaggggttcaagaccagcctggccaatatggtgaaaccccgtctctactaaaaatacaaaaattagcttggcgtggtggcaggctcctgtaatcgcagctactcggggctgaggcaggagaatcgcttgaacctgggagggagaggttgcagtgagccgagattgcgccactgcactccagcctgggtgacagagcaagactccatctcaaaaaaaaaaaaaagtctttgtgtggcatacacgtgtacactaattgaatctagataagttaaagtgcaacgtttgtacacacacacctgtggtgtgtatacgtgtgtgactgcacgcctgctgaggtggctgctttagtccttgtctacatgagtgcgttttgcccgtgtatctacacgtgtccgagtttgtgccggtgcacggacgtatctgcatttatgtgtacacatgtgattgtggcatgacacaggtgtatctgtgctacatagcatttgtatgtgactggaattggggcacacgtgtatttatgcatgtgtgatctgttgtgcccgcacaagtgtgtgtcaccttctggctaggcaggtggccacagttgcatggatcatgcatgtgtaatgtgtgtgtggatgtggcacttgggggtccttgcatacgcccagaccagggaagaccagacaacccacgctacattcctttctagtgtgttctctgcctcctcttcccactccataaacaggaccgatttccacctctttcccaacacccacccggattctcggtccctgtggggctactgcttgtccgggtgtaccctctgacccctcaatgcccatttctacctaaggagatcctttgggaccatctgcaaagacccactcttctgggaagctttccctgctctgcccccatcttctcccgaactctaggcgcctcccccgagcccaggtttttcctccaccccaaattcaaccctacaggatgagagtgtctgtgtttagctctgtcccaagctgggacccccgccccctcccccacacacacaccctgacggcagggtctgagtcatttctgtccctgcaactttgggaacatcagatgcaggaggtgcagccaccaaactgactgagggggcgtggctgaatgcggggtcctcgatccctcccacctcggcccgcgggaagggggcgtcacctgggcccggagcggagggcgccacccacacattctcgccattctccttatcggcttccacgtagcctggaacagagagggcggcctggaggaagcgcggcggccaggggcggcccggtccgtccgagcgggggcgggagaggtgagcactgggcccccgaactccccgaaggggcacccacctagcaccttctcgtagtcctcgtctaacaggaatggcaccagcgcctttttggtatgcgacacgaaatagttgaccacggcgtccagggaggtgcaagagaactgggggcagatgggggagcggtcaggctgctggagaagggacgcggaccccacaaagtcacttctagggactctggcccaacgctcaccggctgttccacatcgatcacgtacttggggccctcccgcttcaccttgtaatgccggaccacgtgcgtcctgcaccaggagaaagcgagtgagtggctcagcccaggctcccacaccgcccctcagggaaggccccgccccaactccaggctccgcctccaatagaaacaggtccatactggctccgcccccacagaaggccccgccactgactggttccaccccataaaggacctaagccccgttgacctcccggagcactgactgcccgatcccagcactgctcccagcggggaccaggcccgaccgacccacccccacagaagaccccacctctagtcttggcaccacctccagcgagggaccaggccagactgacaacaccctaggaaaggtccgcccctaattctggcaccgcgcctagggagaaccaggccctaaagaccccgccccaggtaggccccgccccctgtaatggctccacccccaggcaccgactctaccttctacatcgccttgcccaaccctggactgggcttgagaatttggcataaggctctgacttcgcccccagggctggctccgcctccatagccctactcaacttccaaaaaggatcacggccatgactcccccccgtagatcctgacgctgcccaaagagcccattcccatccctggatttgacttcatcccctccagtggcccagacctggcccctgcgtacctgacgttccggaggggccgatcctaacctaggagtctgactccacctacagggagtcccagctcctaacccaagacctggctcttcctgcaaaggagtcggcctgggctctaccttcttccctaggcattaaccccatacctggggcaaggccagcctcaggatcccacgaccccggagctctgatcccgcccccagccctccctgcccagctctgactccgcccccatgctcccctgcctagcattgactccacccctcccccagcccgcccaccccagctctgactccgccccaacacgcccagcgtagctctgattccgccaccagtgtactctgctcagctctgactccacccgccccagctcgcccagcccagctctgactcctcccccaatccgcccagcccagctctgactcctcccccaatccgcccacctcagctctgactcctcccccaatccgcccagctcagctctgactccgtccccagacgcccgtctcggctctggctccgtcccctggcctacccactagcgggtcggactccgcccctgcttctgaccacgcccccgcgcccaccctcttcccaccctcctcccacccagggctctccagacgcgcatgcgcacccgttgtgcatctgccgcgtggtgaccgacacgccgtcggcgccgtccccgctgggccgcagcagcaggttcccgcactcggggtagcgctccaggagcagttgtgcctccagccggctcaccttcaggaagcacctgtggcgggccgcgtcacccactcgggaccccggagaccaagtccgctcttctgcacgtaaaccctgcctcctctgagacccagccccatccccatcccctaggcccaggagaccctgccctgctctccagacccaggcccctcccacggagacccagtccggccttccaggctcctagtttttgtggggttttttgttttttttttgagacagggtttcgctcttgttgcccaggctggagtgcaatggcgctatctcggctcaccgcaacctccgcctcccgggttcaagcgattccccttcctcacaggcccggctaatttttgtatttttagtagagacgggatttctccatgttggtcaggctggtctcaaactccctacctcaggtgatccgcccgcctcggcttcccaaggtgctgggattacaggcgtgagccactgcatctggccgggttttttggttttttttttctttagagatggggtctcgctatgttgcccaggatgggtctcgaactgggtaaaagcaatcctcccgcctcgacctcccaaaacgctgagatgacaggcgcgagccaccgcggccagccaggctcttaattctggccccggagatgcagctccaacccctagggagacccagccctgcctcgtaggcacctagagcctcccctggagatcctgtcccgccctccaaacacctagaccttaccctggaggccctgcccgcctccctgatcaccaagaaccgcccacaaagacgatgctccgccccccatccaggccccgcctctagggtcccggttaccctctccgacaaataactcctccccggagacgaagcatcaccttctagacacctagactgaccacccccagaccctgtccctactcctcaggcctaggccccgccactgaagaccttaccagtcctctaggcccctagacccgctcctggagatcctgccctgcctccccagcatgggccataactccccctccccctcccccacccccagccccaaggcagtcctcatgcaaaatccaagacccaactccaggggacccaactcaccgcccaccctcagccacacaaccacctcccgtccccatcctgcagcccctcgggacaggcgggacactcacgagggtgtctccagtgcacggcgcgcctcctctttggccaagacttcagacatcatgtataggtgcccaggaagcagggtcaagtcggtcgggacacggagctgaggggcgatcgagggacagtgactgcacctggccagccgggaatggacggctgtgcccaagtcacagagtggcaaattgaggccagagctcagagcaatgaactctgacaccttagagggcaaagagggcttcgagagggttgcagaggagtgttgcatgagagtagatgctggggccgggcgcggtggctcacgcctgtaatcccagcactttgggaggccgaggcgggcggatcacctaaggtcaggagttcgagaccaacctgggcaacatggcgaaaccccgtttgtactaaaaatacaaaaaattagccgggcgtggtggcagacacctgtaatcccagctactcgggaggctggggcaggagaatcacttgaacctgggaaggcggaggctgcagtaagccaagatcacgccattgcactccagcctgggtgacagagtgagactccgttccccgctccccaaccccaccaaaaaaaaaaaaaaaagtagatgctggaatctagggtctcaaactaaagtctgcaggggccaggcaggtctcaaactcaatggcctgccagggtgaggtaggaaacagggaaatcagagggaaatcaggaaggtagactaaaattcccggttgataaatgatgtcagctaattttttttttttttttttttttgagatggagtttagttctgtcaccaagctggagtgcagtggcgcgatcttggctcactgcaacctccgactcccgggttcaagccattctcctgcctcagcctcccgagtagctggaattacaggctcccgccaccacgcccagctgatttttgtatttttagtagagacagggtttcaccgtgttggccaggatggtcttgatctcctgacctcatgatctgccagcctcggcctcccaaagtgctgggattacaggcgtgagccaccacgcctggccaatgtcagctaatttttaaaaacttagcactctgtggccaggcatggtggctcacatctataatcctatcactttgggaggccaaggagggtggattgcttgagcacggaagttggagaccagcccgggcaacatagtgagaccctgctctacaaaaaaatttttaaattagtcagatgtggtagtgtgtgtctgtatcccagctacttgggaggctgaggcaggaggactgcttgagcctgggagttggaggctgcagtgagctatgatcacaccactgcactccagcctgggcaacagagagagaccttgtctcaaaaaaataaaataagaaatacggttggtcgctgtggctcacgcctgtaatcccagcactttgagtggccaaggcgggcagatgactcaaggtcagttcaagaccagcctggccaacagggtgaaaccccatgtatactaaaaatacaaaaattagccaggcgtggtggcggacgcctgtaatcccagctactcgggaggctgagtcacaagaattgcttgaaccggggaggcagaggttgcagtgagctgagaacgtgccattgcactccagcctgggcaacagagtgagactctgtctcaaaaaaataaaacaaaattttggccgggcccggtggctcacgcctgtaatcccagcactttgggaggctgaggcgggtggatcacgagttcaggagacagagaccatcctggctaacacagtgaaaccccgtctctactaaaatacaaaaaaattagccgggcgtggtggcgggcttctgtaatcccagctactccggaggctgaggcacgagaatggcgtgaacccgggaggcggagcttgcagtgagccgagatcgcaccactgcactccagcctgggcgacagagcgagactccgtctcaaaaaaagaaaaaaagaaagaaagaaaaaggaggctttttgaggagatctggagaatgggagagagggcgcagagagccactactcttacctccaccaccgttaagatgaagcctttccacatttcccgacactccaaggtctctacctggggaacaaaagaaaggaaagaatccaagtcagtgagcctcagtctactcatcaatgaaattggactagggaagagtccctgcttcaaagggccgttttcttttttctttttcttcttttttttttttttttttttttttttgagatggagtctcattcttctgtcgcccaggctagagtacagtggcgcgatctcagctcactgcaacctccacctcccaggttcaagcgattctcctgcctcagcctcctgagtagctgggactacaggcatgcaccacctcgcccagcttttttttttttctcttagacatgagggtctcgctttgttgccaggctggtcttgaactcctgggcccaagctatccttctgccttggcgtcccaaagtgctcagattacaggcatgagccaccatgcctggctgatattatgatttttgatgttattatatcaacatttgaaaaacatagatcaggctggatgcagtggctcactcacgcctgtaatcccagcactttgggaggtcgaggcgggaggatcacttgagcctaggggttcaagaccagactgggtaacatagcgagccccctgtctctacaaaaaaataaaatattagccaggcatagtggcatgtgcttggctgaggtaggaggatcgatcgcttgagcccgggaggtcgaggctgcagtgagctatgatctcactactgcactccagcctgggcgacgagcaagaccctgtctcaaaataaaataataaataaaataaaataatagaaaaacatagatcagttcccagacctctcatgctctaaaccctcccataggccagccaccgtgactcatgcctgtaatcccagcactttgggaggccgaggtgggtggatcacttgaggtcaggagttcgagaccagcctggccaacatggtgaaaccctgtctctaccaaaaatacaaaaattagctgtgcgtggtggcacacgcctgtaatcccagctactcgggaggctgaggcaggagaatcacttaaacctgggaggcagaggttgtagtgagccaagattgcactactgcactccagcctgggtgataagagcgaaactcaaaaaataaaaataaaaaataaaccctcggctggacacggtggctcacgcctataattccagcagtttgggaagccgaggtgggtggatcacctgaggtgaggagttccaggccagcatggccaacatggtgaaaccccatctctactaaagattcaaaaaattagccaggagtggttgcgtgcgcctgtaatcccagctacttgggaggctgaggcaggagaatcacttgaacctgggaggtggaggttgcagtgagccaagatcgtgccattgcactccagcctgggtgacagggcgagacttggtctcaaaaaaaaagtaataaaataaaataaaataaaccctcccatagcacccagctcctttggggtcaagacccaagtcttacccagggcccacagggccctgtactacctgccccttcgtggttggcacaatggagggtaggagcatttgagcatcttctgcaagcaccgcccctctgcacccctccagcaagggacctaccttgaacttgatctcctgatcccggagaatcaggctgaagtgggtgccagggtcacgtgagcttccccagggaatctcatctgtgagtttctcaaatgctcccaagttgagcttctccacgtgctgggggcatagaagcaggggatctgggcaccagttccttggcctccaggccccctggatgatgtagcagccaccttgaccacaccatctacattgtctgcttggtctctgggctcaagggaaggcctgctctggagcctccattcccatccttacctggaagtcccgattgctattgtagaaataaatggtgagaccctgcaggcctgcccagaacttcttgtaatcctagggaccagaagtgcagaaagaagaggtgagctggccaagctgagtgcctttcatgtactcaatcctgtctcggggcctttgcactggttgtgctctctgccccacgctgcccccagatctttattacctcctgccttgagtttctgatcaaatgtaccttctcagggagatcctccccacccatggcccagcttctgggtgtctgttttcgtctgagaaaggaccagacggaacctcgatgtgatgagggattcagagcaacccccgccaatctatagagatgggtgctctaggggtaagttaactaactggtttaatggtatcccattcatctttcatcatccagctacccactagccatctatctatcatccatctgtccatccgcccacccacccattcatccatccacctaccattgacccatccattcacccattcatccatccatccatctgcccaccatccatccaccaatccgtccacccacccacccatccacacatccatccatccagttattcatccacccacccacccattcatccatccacctaccatttacccatccattcatccattcatctatccatccacccactcatccatccgtccatcacccccatccatccatctatccatcatggagccattcatcatccatccatccagtcattcatcaatacctacatcacccaccatccatccagtcatccatccacccacacatccatctgtccacccatccatccatccctccatcatccatccactcatccatccacccactcatccatccatccactcatctatcaatgcatccctccatccatccacctactcatccatccatccacccatccatccatccctccataatccatccatccatccactcaccgtccatcatccatccacccactcatccatccacccactcatccatccacccactcatcaatccatccacccatccatccacctatccatccatccctccatcatccacccaccatctatcatccatccacccactcatccatccacccactcatccatccatccatccatacatccatccactcatctatcaatgcatccctccatcatccatccacctactcatccatccatccctcatccatccatcatccatccatccactcatccctccatcatccatccacctactcatccatccatcatccatccatgcattcatccattcaccatccacccacccacgcatcttcccgttcatccatccatacatccctccatcgtgcatccacctattcatccatctatcattcatccatgcacttgttcatccatccatcatccacccacccacccgtctgcccactcatccatccatccactcccccatccatccatccacccacttgtatatgcactcatccatccacccacacatcctctcagccaccatcaagcccgcatgtattcaccaagcctccactcatccccccatctacccatccacctgtccatccgtagacacaagcacagatacacacatgcatttacctaacatttactgaaggctttttatgtgccagccctgctccaggcactgggactagagcaatacaggattaaacactgtattgcttcattatgtacccacgatgtgctgttgggcaagttatttgagctgtctttgtctgtttccccagctgtaaaatggtgataataatggtgccaactctggaggatctcatgagaattaggtgactttccacatgggaagcaccagggcctgcgttgagtcaagtcctcaacacgtgaactgtgactacagccctaactccctatttcagaagacagaaaactaaggctcaaagattaagtcacttgcataaggcctgggagtaaggaaagtgtggagccgggattagaacctgggtcttcttaattcgggcccatgatcttttttgttttgttttgttttgtttttaagagacagagtcttgctctgtcgcccaggctggagtgcagtggtgcgatctcggctcactgcaacctccacctcccagttcgagccattctcctgcctcagcttctcaagtagctgggattacaagtgcgcaccaccacatccagctaatttttgtattttttagtagaggtggggtttcactatatgttggccagggtgttctcgaactcctgacctcaagtgatccgccggcctcgccctcccaaagtgttgggattacaggcgtgagccactgcacactgccttttttttttttttttttttttgagacagagtctcactctgtcacctaggctgaaatgcggtggcaccatctcagctcactgcaacccccccgccccagttcaagcaattctcctgcctcagcctcccgagtagctgggattacaggtgcacaccaccacgcccagctatttttatttttagtagagatggggtttcatcatgtggccaggctggtcttgaactcctgacctcaagtgatcctcccacctcggcctcccaaagtgttgggttacaggcgtgagccaccacgcccggcccccattatctttcttttcttttttttttctttttgtttttgagagcagtctcgctcttgtcccccaggtttgagtgcaatggcttgatcttgactcactgcaaacttcgcctctcaggctcaaatgattctcctgcctctgcctcccaagtagctgggattaaggcgcctggcaccatacccagctaatttttgtattttttagtagagacgaggtttcaccatattggccaggttggtcttgaactcctgacctcaggtgatccgcctgcctcggcctcccaaagtgctgggattacaggcgtgagccacaagcccggcctcccccattatctttcttaactgcagtgatctactggctctaaagggtttgttggttggggaggatttggatgtatggaggtagaaggaaagtctactccactacaggtaagggaacctcaggggcagaggcggggacatgggcagggaggagctgggggtgtttgttttgatctgtattagaaaatgaggcagtcatggtggctcacacctctaatcccagcagtttgggaggctgagacaggaggatcacttaaggccaggagtttgagaccagcctgggcaacatagcaagaccccatcttttttttttttttgagacggagtcttgctctgttgcccaggctggagtgcagtggcacgatcttggctcactgcaacctctgcctcccaggttcaagtgattctcctgcctcagcctccagagtagctgggatcacaggcacgcaccaccacgcccggctaatctttgtatttttagtagagacggggtttcaccatattggccaggctggtctcaaactcctgacttcaggtgatccacctgcctcagcctccctaagtgctgggattacaggtgtgacccactgcgcctggccagcaagaccccatcttcaaaaaaaaaaaaaaaaggctgggtgcggtggctcatgcctgtaatcccagcatttagagaggccgagacaggtggatcacctgaggtcaagagttcaagaccagccgggccaacaaaatgaaacactgtctttactaaaaatacaaaaattaggtgtggtggtgcgtacctgtaatcccagctactcgggaggctgaggcacgagaatcgcttaatcgtttgaacctgggaggtggaggttgcagtgagccgagatggtgccactgcactgcagcctgggtgacagagtgagactcagtctcaaaaataaataaataaaataaaagccagaagaggcagtgcatgcctgtggtcccagctactcaggaggctggggcgggaggttcacttgagcccaggagtttgaggctacagtgagccatgatcgtgcccctgcactctagcctgggtgacagagcaactctgtctctaacaaaaagaaagaaagaaaatgaatatgcggcattgggaaggagagatagggcctcacggggaacggaggggctgggactttattctgagggagacataagcacacacacacacacacatgcacgcactgtccatggcaactatctgtcctgtggaatgtggcccccgctagctcttactgtcctcacatgtcacctgtcctggccttcgccccagcagctgaggttcacggagtttttcctgggctgggagcgggaggaagctcgggagtcagaggactccccatttcctggaggaagtccctgatcttgtttgtattcaagagagtgaacgagagacaaaagcaaagattgagacaaagagagagggagactgagacagacatcgggagagacagacggggccagggagagagaaagagaaaaagaaaccaaattcaaagacacacggagacagagatagacgcacagagaggcagatggccagaacccaccccagtcccccagcacgtgtcctgccccatccagcacccaccccgcccccccttggcgagtggggagacagggactcagagaggtgccgcagctccccacggtggcccagcagggccagcccccgcctccccaccttacccggtcacagggccccttcttctctagaaagctctcatagtagtgtgaaggcaggacacccttaggcttggggacacggggtggcctcagggcagaggccatgacggagccagggtcttccgcctggcctctccttccagtgggtgccccagctgggccgggaagctgagaaacaggtttcaggggagtttcctgtgtcagcccgtcaactccctcccctgccagggctgggcagaggctgatcccagcaggtccagtgatcctagggaaatccccgcctctccggtgtggaactgagaacagagagaatgtataagtctacttgaatgggagaataatcttcgctatatctgcaaagacagagacatggtctgtctctttatttatttatttatctatttttcctattttgagacagagtttcactctgttgcccaggctggagtaaagtggtatgatcttggctcactgcgacctctgcctcccgggttcaagagactgcgctgcctcccgggttcagagactgagtccaagctcagtctcctgactagcgtggattgcaggtgaccgccaccacgcctggctaatttttgtatttgtagtagagacgaggtttccccatgttggcccaggctggtctcgaactcctgaccccaagttttctgcccgcctcagcctcccaaagtgctgagattacaggcatgagccaccacacctggccctttctcttactttgatggaccctaatgattacattgggcccacctggataatccacgctactctccctattttaaagtcagctgactagcaactttaatttcatctgcaatttttcttttttagacggtgtctcattctgttgtcgatgctggagtgcagtggcacgatcatagttcactgcagccctgacctcccaatctcaagcggtcctcctgcctcagccacccgaagagctgggactataggtgggcaccaccacacccagctaatttattttccttttttaaggatgagttctcactatgttgcctaggctggagtacagtggggcgatcatgactcactgtagcctcgaccttacaggctcaagtgatcctccagcctcagcctccagagtaggtggtactacagttgcatgccaccacacctggctaatttttttttttcttttttttgagacagactctcgctctgtagcccaggctggagtgcagtggcgtgatctcggctcactgcaagctccgcctcccaggttcatgccattcgcctggctcagcctcccaagtagctgggattacaggtgcctgccaccacgcccagctaatttttacacttactagagacaggttcttgctatgttgcccaggctggtctttttttttttttttttttgagacagagtcttactctgtcacccaggctggagtgcagtggagcgatctcggcttactgcaacctctgcctcccaggttcaagcaattctcctgcctcagcctcccgagtagctgggattataggcacgtgccaccatgcccagctaatttgtttgtatttttattttagtagagatggagtttcactgtgttagccaggatggtcttaatctcctgaccttgtgatccacctgcctcgacctcccaaagtgctgggattacaggcataagccaccgtgcccggccctcaggctagtcttgaactcctgggtgcaagtgatcctccagtctaggcctcccaaagtgctggggttacaggtgtgtgccactgtgcctggcgtctatctttaatcttcaaatccctttgccacgtatcctaacgtattcacagattctgggaattagggcgtggatatctttaagagaccattattctgcctaccacagcctgtttaatatggtggacaattgattaattttgaatactgaatcagtcttgggtccctggagtaaaccccacttgtcatggtgtataattcactttatatattgttaaattctactttgtaatattttgttaaggatttttgcacgtcttcatgagggatatggggtgtagcttgctttctttgtaccgtctttatctggttttggtatcagggtcatagttccataaaatgaacagggaagtgtccccttcaattttctggaagagatgatgtgaaattggtgttaattcttctttgaacctttggcagaattccttagtgaaaccatctgggtctggagattgcttttttgggagtttttaaattacaaattcaatttccttagtagttaccagggctagactttgtatacatagcagaacaggtgttctagaaatcacagaaaggccgtgggactgtggcaatgtgttcatccactgaactgtctgataaagttgatagtatcagctatactaagtaaggtcagagagttgatttttgtttcgtttttttgtttgtttgttttttcagacagggttttgctccttttgcccaggctggagtgcagtggcatgatttcggctcactgcaacctccgcctcccgggttcaagcgattttcctgcctcagcctctggagtagctgggattacaggtgcctgccaccacccccggctaatttttttgtttttattagagatggggtttcaccatgttggtcaggctggtcttcagcttctgacctcaagtgatcccaaagtgctgggattacaggcgtgagccactgtgcccagccagggtggttagtttttattgtatttgtctaaggcaatgtggagcgacagaaggatttacagcatgagaggagggcagggtgcggtggctcacgcctgtaatccaaacactttgggagcccaagtgggaagattgcttaaggccaggacttggagaccagcatgggcaacatagtgagatccccttcttttacaagaaaattaaaaattagccaggcatgctggtcacgcctgttgtctcagctactctggaggctgaggcaagaggatcatttgagtccaggaggccaaggctgcagtgagccatgattacaccaatgcactccagcctgggagatagagcaaggccctgtctcgaaaagaaaagaaaataggctgggcgcagtggctcacacctgtaatcccagcactttgggaggctgaggcaggtggatcacctgaggttgggagttcgagaccagcctggcaaacatggtgaaaccccttctctactaaaaatacaaaaattagctgggtgtggtgatgtgcatctgcagtcccagctaattgggaggctgaggcaggagaatcgcttgaacctggtaggcagaggttgtagcgagccaagatcttgccactacactccggcctgggtgacagagcgagactccgtctcaaaaaaaaaaaaaaaaaaaaaaa
